United States Patent Application Publication US 2026/0026509 A1 - sequence listing, part 2

SEQ ID NO: 32 - DNA, 977357 bp, Bacillus velezensis
  source 1..977357: mol_type = genomic DNA
tggaattggcagacacacaggacttaaaatcctgcggtaggtgactaccgtgccggttcaagtccggccctcggcacttattgttgcgcccgtagctcaattggatagagcgtttgactacggatcaaaaggttaggggttcgactcctctcgggcgcgccataatatttttaaaaatcgggaagtagctcagcttggtagagcacatggtttgggaccatggggtcgcaggttcgaatcctgtcttcccgaccattttggggccttagctcagctgggagagcgcctgctttgcacgcaggaggtcagcggttcgatcccgctaggctccacttgattttaattgttttttggcggtgtagctcagctggctagagcgtacggttcatacccgtgaggtcgggggttcgatcccctccgccgctaccattggacctttagctcagttggttagagcagacggctcataaccgtccggtcgtaggttcgagtcctacaaggtccaccacttatacggaggaatacccaagtctggctgaagggatcggtcttgaaaaccgacaggggtgtcaaagcccgcgggggttcgaatccctcttcctccgccatatctaatttaattatcatcgcggggtggagcagttcggtagctcgtcgggctcataacccgaaggtcgcaggttcaaatcctgcccccgcaaccaaaaaaatggtccggtagttcagttggttagaatgcctgcctgtcacgcaggaggtcgcgggttcgagtcccgtccggaccgccatttataaaaaggctcggtagctcagttggtagagcaacggactgaaaatccgtgtgtcggcggttcgattccgtcccgagccaccatttaatttaatattgttttggcggttgtggcgaagtggttaacgcaccagattgtggctctggcactcgtgggttcgattcccatcaatcgccccaaacaacatgcgggtgtagtttagtggtaaaacctcagccttccaagctgatgtcgtgggttcgattcccatcacccgctccatttttatattgtcatgggcctgtagctcagctggttagagcgcacgcctgataagcgtgaggtcggtggttcgagtccactcaggcccaccatgatgatttttccacagtagctcagtggtagagctatcggctgttaaccgatcggtcgcaggttcgaatcctgcctgtggagccatacggagaagtactcaagtggctgaagaggcgcccctgctaagggtgtaggtcgtgtaagcggcgcgagggttcaaatccctccttctccgccataaggcccgttggtcaagcggttaagacaccgccctttcacggcggtaacacgggttcgaatcccgtacgggtcattaaaaaaccttgcatactatgcaaggttttttattatgcgttcatagcgtaaatggtaaaagacaggtatgtggcaaaagcgctccataataaataagggaccagaagccaggctgaagctttactgtatttaccggcaatgagcaacagaatgagtgttgtcaccgccacaagcaggcaatcaatagatgcagcaagcaaatttttctgtgtgaattgaaaatagctaaacccttgattcacgatataattgatgagaagcatcacccaaaaatctttggattctttacatgaaaactttgcgtatatcaaggctgctgagagcgaaataagcgcaaacaaaaccgcccatatgatgccgatcactgatctgctcggcgtccagtcaggtttctgcagcgcgtcgtaccattcccggtcgatgggaaagagaaaccccgctaaagaaaagaagacatatgtaatgataaatacaataatcgcaccgatatacttctttttcatttgttccctccgtcattcaatttcaataattagttcacttttttggaaagattaaaccttttaaaaggttcatgcaccattaagtgtatgagttttcagtgtgaaaatgcagcaaaccatttatttgtatccaaaaaccccggcaggccggggttttaatcagcatgaagatcgccaaaggtcgtcataattccttcttcatccagttcctgctcatatttttcgtgtgctttgcttggatacacggaaatgttttttccggtaatatctgtcccgataaagttttcataatcctcagcatagccgatgttttcttcggagttcattgtcatatccccatagctgagcggcggatcctctaaatcctgaggggtttctgagtttccgtattcctcaacatcctgataagcatcttcactatcgtaagccgcccggattgattcatcatcatcaaattcaaactgtccgaacggtgtttcctcttcaatcggcctgtctttggaaacggcatcctgcgaggaatattccgccaatgtcgtagccgtcggcagagcttcgagtctgtcataaggaatgtccttgccgctgacttcacatgtgccgtatgtgccgttttcaatttgtttcagagagtaatcaatgtcgcgaaggtgctcccgttcatggtcgagcagagccaggtctttttcccgctcgtataattcggttgcctgatcgccgggatgattgtcataggaagacaattcgccggatgactgatacgggaattcatcagttaactgaaattggtcattttctttaaagcggcttaaaatatcatgtctggcttcttccaattctttttttaagtgtgtgatctgttcgtttgtaagcacatcaatccctcgtttctatgtgatgcttactgttagtatgaacgcttttgcgcagaaaaatggtggataaaaatagtcattttcccatgaggaagtaaaaggatacagtgattgccgagagtggggaaagaaaattcaagtttgtttctttattcatttgcgcaaaaaggtttataataagaaatgcaggcattttgtcgtgctcaaatctgtgtgtttgacacaaagtcatcacaggtgtattgtattaaaagcatttaacggattatggaggaatgtctcatggtgacaacggtgcagcatacgttccgagaggaagcagatcatgcattacataaagccaaacaagtcaaccatgctgtcttattgagctattcaagacgtattgcgtctttagaccctctatcatttttcaaagacggagcaaaaaaatataaaggcaaacgatttttttggtcagaacccggtagtgaattaacaatagtcggtcttggcacagaagcgctgttccaatcgaatgaaaaaaatggaaagcgttatcacgacgtttttgaacaatgggagcgctttaaaaagacggcttttcatattcatgaagaagaggcggcgcataccgcggtcggccctgtcttattcggcggtttttcatttaatcccgctgaagagagaggagacgaatggaacgggttcgaagaaggactgttctttatcccctcactcatgctgacaaagacggcagatggtgattatttaaccgtcaatcaatgggcggcagacggtaatcaagcagaagatacgctgaaacgtctgaaatctttttcgggtgctttttcagtttcttcaatcgagtatgaagaatatcctgttttaacaaaagccgaagaacttgatgtggaaaactggcttgaagccattaaaacagcaacaaatgatatgaaagcaaatcaatatgataaagtcgtgctggcaagggaagtcgttttgtcatatgatggacctattccgacagagagcgttgtccgcaagcttttgaaggaccaaacgacaagctatgtttttgcgattgagcagggagataaatgctttgtcggcgcttcaccggaacggctgatcaaaaaatccggcaaagacgttatgtccacctgtctggcaggttcaattaagcgcggagaaaatcaacaagaagatgaccgtctcggcaaagagctgctgcatgacgaaaaaaatctcgcggaacatgattttgtggttcagatgatacacgattctttcttgtcgagctgcagcgatgtgaaaaagcctgcaggtccgcaattatataaaacaaaaagtgttcagcatctatatacaccgatcacaggccatcttaaaacgtccgcttcgctgtttgatttaattgaaaagctgcatcccacaccggcattgggcggagctccccagcagaaagctgttgaagttatcgctgatattgaaccgatgacacgcggatggtatgcggctccgatcggctggatggacggcagggaaaacggagaatttgtcgtggctatccgatcagggctgattgaaggcaaaaatgcgcggcttttcgcaggctgcggcattgttgaagattcagatccgcaatcagaatatgaagaaacacaaattaaactaaagccgatgatctctgctttaggaggtgaaaggctttgacaaacccgatcacacattatatcggaagctttattgatgaattcgctctatcgggtgtcaccgacgcggttgtttgcccggggtcgaggtcaactcccttggcggttttggcggcggcccacccggatattcaagtccatatacagattgatgaacgatccgcaggttttttcgcactcggtcttgcaaaagcccgccagcgtccggtggtgctgatttgtacgtcaggaacggcagcggctaacttctatccggccgtgattgaagctcattattcaagagtgcctcttattgtcctgactgctgaccggcctcatgaattgagggaagtgggggcgcctcaggcgattaaccagcattttctgttcggtaactttgttaagtttttcacagactcggctctgcctgaggaaaatcctcaaatgctgagctatatcagaacattggccggcagagccgtaagtgaagccgggaagcgcccgatggggccagtccatatcaatgtgccgctcagagagcctttgatgccggatttatcagccggaccttttgaaagaatgagaaaggggcggcacgtctcagtcacaacagggattcagtcagctgatcaagattctctctgtcatattacagagcgtcttgcgggtaccgaaagaggtatgatcgtctgcggcgaaattcacggtgaagcagaaaagcagcaaatcatcgcgcttgccgagatgcttcagttcccgattttagctgacccgctttcaaacctcagaaacggggagcatgataagacgctgattattgatgcttatgactcgtttttaaaagatgaagaaataaaagaggcgcttcgcccggacgctgtgatccgcttcggcccgatgccggtttccaaaccgctctttttatggctcagagatgatcctgccattgagcagtttatcgtcgatgaagacggaggatggagagatcccacccaggccggagcgcatatgattcattgccatccgtctgtgtttttggaagcggtccgttcagctgaaaccggaaaacggccgtccggatggcttgagaaatggcagtttgtcaatgagcggttccggagtcatttacaggccgcgagcatggatgatttatcttttgaaggaaatgtatatcgtcagcttcagcaccttgtccctgaaggcagttcgatttttgtcggaaacagcatgccgattcgcgacgtggatacgttctttgaaaaacaagatcgttccttccgtgtttatgccaaccgcggcgctaacggcattgacggagttgtctcctcggctatgggactgtgtgagggtacaaaagctcctgtcacgcttgtaattggagatttatcgttttaccatgatttaaacgggctgttagcggctaaaaaacttggaattccgcttacggttattttaataaacaatgatggcggcgggattttctcgtttttgccgcaggcatctgataggactcattttgaagaactgttcggtacgccgacgggccttgatttccggcatgccgccgcactgtacggcgggacgtatacttgccctgagacatgggaagcatttaaggatgcgtatcagccgcaggcggacaagcccggacttcatataatcgagctgaaaacagatcggacatcaagagttcaattccatcgcgatctgctgcaggccgcagtgcgggaagtgaaaaaagaatggaagctataacagttaaaacggccgacggcgtgtgctatcgggttgctgatagcggtcacgaatcatctgaagctattgtttgtctgcatggatttacgggcagcaaagaatcatggatgtttttacgcggcatgtttcccggtgaacgaatggtgatggttgactgcctgggtcacggggggacagacgcgcctgtgcaagcggcaaggtacagtgcgagccggcaggttgcggaccttgccgccgtttttgatcaattaaaacttcacaaagtgaaacttattggttattctatggggggaagacttgcgtattcctttgcacaggcatttccgcatcgggtgtcagcgcttgttttggaaagtacaactccgggcctcagcacgcttcaggaacgcaaaaagcggattcagtcagaccggaagcttgctgactttatattgcgggaaggtataacatcgtttgtcgattattgggagggcattccgttgtttgcctcgcagctttctctgccggacagcgtaaaggcgtccatccgtgccggcaggctgaaaaataatccgtccggacttgcaggcagcctgctcggaatggggacgggctcacagccttcctggtgggaggcattacaccgcatcaaggcgcccgtcctgctcatatgcggtgaatgggatgaaaagttttgcgctattaatcaaaaggtgcataacctgctcccatcaagtaaaatagaggttgtcaaacaggcggggcacacggtacatgtggaacagccgcgaatttttggtaagatagtaagtgagtttttatacggcttgtaaagcataaagaaaatagcttttcggccggactcaggcaaaaatgaaggaggtcatatcaatggctgcagaatggaaaagtgaacgtcagtacgatgaaatcctgtacgagacgtataacggtattgcaaaaataacaattaaccgcccggaggtacataacgcatttactcctaagacggtatcagaaatgattgacgcgtttgctcgtgcacgtgatgactccaatattggtgttatcgttcttgcgggagcgggagataaagcattctgttcaggcggagaccaaaaagtccgcggtcacggcggatatgtcggagacgatcagatccctcgtctgaatgtgcttgatcttcagcgtttgatccgtgttattcctaaaccggtcgtagcgatggtatcaggctatgccatcggcggaggacatgtgcttcatatcgtctgtgatttaacgattgcggccgataacgcgattttcggccaaaccggaccgaaagtgggaagctttgatgccggttacggctcaggttacttggcgcgtatcgtcggacataagaaagcccgtgaaatctggtacctgtgccgtcaatacaacgcgcaggaagcgctcgacatggggcttgtcaatacagttgtcccattagagaaacttgaagaggaaacaattaaatggtgtgaagaaatgcttgagaaaagccctacagcccttcgtttccttaaagcggcatttaacgcagatacagacggcctcgccggaattcagcaatttgcaggagatgcaacgcttctttattacacgactgacgaagcgaaagagggccgcgattcctttaaagagaaacgcagtcccgatttcggtcagttccctcgttttccgtgatcagatgacactacgaaacagcttgagccgctctggtccaagctgttttcttttcaaaaaaagtacttttacctcggagatgataacatgctgacagaacagccgaattggctcattcaaagggctcagctgacaccagagagaatcgctctcatatttgaaaacaaacagatgacattcagagaattatatcatgcttctaaacaaatggccgcgcggctgtccaaatactgctcgcttaaaaaaggagaccgcgctgcgattttgctttctaacagaccggaaatggtttatgccgttcacgcctgtttcttattaggggcggaagctgtgctgttgaatacgaagctctcaaaacaggaacggttatttcagctcgaagattcacaggcaaagcttttattgacggaggacggtttttgccgcgaagaatatgaatctgcagtcgccaccgcagatgtggacgagctgcaggctgaagaggcgggtgacatggagccagaagcttatgtaacgcttgatgatacggcgactcttatgtatacgtcaggaacaacaggaaggccgaagggggtgcagcagactttcggtaatcattattccagcgctgtatcgtctgcgctgaatctgggggtcacggagcgggaccgctggcttattgcgctgccgctgtttcatatcagcggtctgtctgcgctgtttaagtcggtcatttacggcatgcctgtcgtgcttcatcaaaaattttctgtcaccgatgtgcttgacagcatcagctcccatcaggtcacgatcatttcagcggtgcagaccatgctttcgggcctgcttgcggaaactgaacaatgtcctgaatcactgcgctgcattctgcttggcgggggtcctgcaccgctgccgctccttgaagaatgccgcaggaaacaatttccggtattccaatcttacggcttgactgaaacctgctcacagattgtcacgctttctccggaattcagcatggacaagctcggctcggccggtaaaccgctgttttcatgcgaaattagaattgaaaaagacggaaacccttgtgtgccgtttgaacacggtgaaattacggtgaaaggcccgaatgtaatgaaagggtattaccatcgtgacgacgcaaaccaggccgcttttcataatggatggtttaaaacgggcgatcttggctatttggatgatgaagggtttttatacgtgctggacaggcggtcggacctcattatttcaggcggagagaacatctacccggcagaagtggaagcggcgctgcttgcccatccggctgtagcggaggccggtgtttcgggagccgaagatccgaagtgggggaaagtgccgcatgcttttctcgtgctgacttcttctgtcagttctgaggagctgaccgccttttgccgtgagcggcttgcaaaatataaaataccggctgcttttttcgaggttgacgggctcccgcggaacgcgtccaataaactgatgaggcatcggctgaatgagcttcgtaaaggagaattgtcatgattaagattgaaaaaatcaccctttatcatgtaagtatgaggctgaaaaaaccgtttaaaacaagtattgaaacgctgcaggaccgtaaatttttgatcgtggaagcgatcgatgaaaccgggagaaccggctggggggaggtatcggcgttttcttctccgtggtatacagaagaaacgattcagacatgtgcgcatatgctgagagatttttttatcccaaatgtcgtaggccgcgagtttttccatccgtcagaagtgcctgacagtctcgcgcgtttcaaaggaaaccgcatggcaaaagcgggacttgaatcagccgtgtgggatctatatgccaagaaaaaggggatatctctcgcagaagccttagggggcaaaagagataaagtgcccgccggcgtggcggtgggtctggcttcggctgatgagatgcttcgggaaattgagcaatacgtaaaagaaggttatcaacgtataaaaataaaaattcagcccggccatgacgttgatctgatcagagccatccgcagccgttttccgaacgtaccgctgatggcggatgccaactcggcatatgaactgaaagacatcagcaggctgaaagaattggatgaattccagctcatgatgatagaacagccgcttcaggcagatgatattgtcgatcaccgccacctgcagaaacacttgagaaccgcggtatgcctcgatgaaagcatatgctcatatgatgacgcaaggcgggcgattgagcttgggagctgtaaaatcattaacataaaaccggcgcgtgtaggaggcctgacagaggctttaaaaatacacgacttatgcagagagcatcacatgccggtttggtgcggcggaatgtttgaaaccggcatttcgagagcgcagacagtcgcgctcgcttcgctgccgcaatttacgataccgggtgacatttcctcatcagaccgatactgggaggaggatattgtcactcccgacatccgtatcgaagagggattcatctctgttccggacggtcccggactgggtgtcgaagtcaatcaggaaataatgagaaaatacgtcacccaaatggacgtttttacgacaaacaactgataaaaagacatttcagcgagttgagctgcctgtatgctgctgttatattgaaattgttcatcatcaccccttccccagtttgaaccggctgtatcagccggtttttttaataggcgaatgcgatgatttttttattcttcaaacagcgcgcaggtgttgctttctggctggggccaagatgtacatcttgataaaaaattacgtgcttatcatgaatgcgatattgtaccgtctgccgccgcatatatttgccggcgaaccgcctttctgccatgcttctcatccgcgcggttttctccggctcaggggctgatttcaaaaaggcttgcggcgcggaaatgaaaaagagctgtataaaacagctctttacttttataaatcatgcggtttaaaggttttgcaatccgtttcttcacttttttcagcggtttcgcctgtatggctgaccacataaatagcgtcggccgtgcatttgtttcctctgccccaatatgaacagttattgacttcacacagaattttttggtccatgctggctcccctccaagataaaaggtacgccattagtatgagccgccctgatttttgttattcctcctggcggatataacgtctgtctttcataaagagcttccagaagaaataaaacccgggaaacaaaatgatgaaagcgacgatatacgtcataaacagcgccctgaaggttgccggctccgtaaatcctgacatgaccgtaatatccggataaatcatataaggaagatgcgcccgtccgtatgcatagcttgccagaaagtattgaagcgcaatggcgatcatggcgattcttggtttgccgaggttgcggccgaagcgtttattcggcaaaaacagagccacgccggcaatgataaatgtaatgacagacagaatgagccatgtcttgtctttcatcatccccgtatacagccagccggcttcagagcgtaatgtcagcataatgaagaaggcaaaaagaagcgacagcggccctgttattaaagagctccgtctgtagatgcggtacgcatgctcctcttccgcaacatttgaaaaatcggccagaagcagtgaagataaaaataaagtgcttaaaatggcaaagccgataaacgcatacgcattaaggcttgtaaagacatttgccaaattcaggtgatacacgccgcccgtcttatcaataaatcctccgtgtgtgaccggaaggaccaaaatcagcacagcgggaataatgaagcccgaaattccggagatatatctcatgatttttctttccttcgccgtattggagaagacgagaaagccgctgcggatggctaaaagcagtaaaataatactccccgggatcaataaaacggttcccagcacgaaggttgcccctggaaagaagctgaatagggcgacaacgattgcgacgataaagacgttggtcacttcccatgtcggggacaaataacggttggcgatgtttgtcgcctttgtttgttctctatttaaataaatcatcgaccaaaagccggctccgaagtccatcgttgccatgaccgcgtagataaacacgaagccccatacgattgatatcgcaatgagagcatccatggtaatgtccatttcaattcagccctttctattgttaggattccgccgcttttacatcctcctcaacgggatgtttgcggaaataataaagcagcacataaatgactgcggctgccaaaatggcgtaaaccactgtaaacaggatgaacagcaaaccgattgaaccggttgtcgtgacgacatcagacgttttcaggagatggtaaatcacccatggctgccgccccgtacaagcgaatatccacccgaattcaattccgatcagactaagcggtcctgccgttaaaaataaaatcaaaagccaagtcggaaagctgtctttctttaaaatttttctccacacgatgccgatgattgagtacaaaatgagcagcattccgatgccgaccattccgttaaacagtgtatggatgaataaaggcggccactcgtctttcggaaacgcgttcaatcctttgacgacggtatcaaagctgtttgcagccaaaaagcttaaagcccatggcacttctatcgcccattttactttttcttcttttgcatcagtaaaacctccgatcgcaagcggagcgtgtgatctagtttcaaaaagcccttctgcgcccgcaagcttctcaggctggtattcgtaaagaagctgggctgactcgtgaccgtttaaagaggcaataatggagaatatcccgccgatcgttaaggcgagcagcagcgcttttcggtgaaagcggtatacctgctcctgttttctcgttctcagcattttataagccgcaactgacgcaacgataaatgcaccggtcatgaaagccgtcagtacgacatggcccgcggtggtgaaaaagcttggattaaaaaacgctgcccaaggttcgacgtcagtgattttgccgtttaaaattttaaagccggccggcgttccttcaaatgcgtgaacatttgtgattaagacggcggatgccgcggcgccgatcaaaacgaaaataacggcaatgatgcgcatcgccggagtcagccggtcagcggcgtagacataaatggacataaacagcgcttcgataaagaaagcataaatttcaatctgaaatgggagggacatcactctgccgatgacttccatgaatccgggccacaaaagggcaagctgtgtacccgcgatcgttccggtcggtatcgccacgccgagcagaacagcctgcgccttcgtccaccttttcgccataatggcataatgcggatcttttgttttttgataaatcaattcagccattaaaatcatcagaggcaagccgacaccaagcgtcgcaaaaataatatgaaagcccatggttgtcccgaacaggcttctggctaacactaaatcatccacgatcataaaccgcctttctaaattaccgttttatgtaatgtggttatattatttgctgaagcgattagattattctctcgattccatatatgtgcagggtttagaaatcaagggatcagggcatatatgattgacaagcggttatttaaggtttaaaataaaacgtaattattacgatttgagaaagggagatcagcatgaaaaaagatattcatccggataaccatcaggtgatttttcaagatgtgaacagcggctatcgctttttaagccattctacgaaaaaatcagaggaaacggcagagtgggaagacggaaaaacatacccgctgattaaagtagaggtcagctcagatacgcatccgttttatacaggccgccaaaaattcaacgaaaaaggcgggagagtcgaacagttcaacaaaaaatacaatatggggaaataagacaagcccaatggggcttgtcttatttattgagcactttgtcatccgtgcggggagtgacgaaatgacccgtcttatgttatattgtgaataaaaaagcagaaaggaaacaccaagatgagtcttctaaacgatatcatgcaatttaatgagcagttcactaaaaacaaagattatgaaaaataccaaacatctaaattcccggataaaaaaatggcgattttgtcctgtatggacacacgtcttgtagaattgcttccgcatgcgatgaacatgcgaaacggcgatgtgaaaattattaaaagtgccggcgcgcttgtcgcccacccgttcggaagcatcatgcgcagccttttagtggccgtatacgaattaaacgctgatgaagtctgcgtcatcggccaccatgattgcggcatgagcaaaatcaacagcgaggatatgcttgataaaattatcgaccgcggtattccgaaagagcggattgacatgctgaagcactcaggagttgatcttgatcaatggctgaaaagctttgattcagtagaagcgagtgttacagacagcgtaaacgtcattaaacaccatccgctattccctgacaatgtgccggtgcacggtctggtgattgatcctgaaacgggtaaacttgatctggtgatcgacggctaccagcatatggactaatgtttttcttttttgtccggtacgggatcaacaccgcccggatgaaaagggtggcactttaaaatccgcttcagtgtcagccatccgccttttaatgcgccgtgagtcttgacggcttcgattccgtactgcgaacaggtcggataaaagcggcatgacggcggcgtcagcggagagatgaacttctggtatccgcggattaaagcaatcattatggttttcatcaaaaaaccacctttctgatgctagtatagaaaaaaaatttcagattgaaaagcttccgccacaattcttatcggaaaactgtgttataatggatgcatattctgaaaaaaagggagtgccattatgccttcagtagaaagttttgagcttgaccataatgcggttgtggctccgtatgtaagacattgcggagtgcataaagtcggaacagacggcgtcgtgaataagtttgacattcgcttctgccagccgaacaaacaggcgatgaagccggatacgattcatacgcttgagcacttgcttgcgtttacgattcgcacacattctgagaaatacgatcacttcgacatcatagatatctcaccgatgggctgccagacaggctattatcttgttgtcagcggcgagccgacagcggaagaaattgtggacctgcttgacgctacgctgaaagaagccatcgatattacggagattccggcggccaacgaaaaacagtgcggccaggcgaaacttcatgatttagaaggcgcgaaacgtctgatgcgtttctggctgtcacaagataaagaagatttgctgaaagtgttcggataaaaaacaggcctttttgctgacatgcaaaaaggcttttttacatatttctaaaaaatgtcacaccttatgtgtaagcgtttgctaaaatagaagcaaacataaaggagtgatgggatgaaacgggctgtattggcaggtatgtgcggtatggtatttctattatcttcctgtgggggcaattcggacaaaacctccgcagatgaggaacctaaagcgcttgaggtcaagcttacaggaccggaaacggcagcaccgcatgaaaaagcggaatacaaggcggaggttttttacggcggcaagcgtgtcacggatgcggatgaagttatgtttgaagtatggaaagaaggaaaaaaaggcagcagcaaaacaagcaaggccaaggaggaaaaaggggcgtatcacctgcggactgaatttgatgaagagggtgtgtataccgttcaatcccacgtaacggcaaaacagcagcataatatgccgactgtaaaagtgcgtgtcggggatgctgaagctgccgatgattcctccggccatgaggaacagacgcatcatcattaaggattttttttatccgtcaagccttttgatgcgtcctccggcgggtcaatcgtatgttttacattataagctcttacagtcgaccagatggataaaagcagcacggcgagcacgataagaaagccgaagctcagaagaagcagcatgaaatccctcctttttaacaaatcataacatattttccatccgtaaaatcaagggctaaaaatttatgttttaacacacgatatatagggtatatcaatagtaaaccgaaggaggaagataggcatgtcagaaaaactattggatgcagtcaataagcaagttgcaaactggacggtcatgtatgtgaaattacataactatcattggtacgtcaaagggaaggactttttcacattgcatgaaaagttcgaggagctgtataacgaaacggctacatatattgatgatctggcagaacgtctgctggcattaaacggcaagccgatcggcacaatgacggaatcattgaagacagcctctgtaaaagaagcggaaggcaatgagagcgcagaacaaatggtacagaacatttatgatgatttcactgtcattgcggaagagctgaaaagcggcatggacctcgcagatgaggtcggagacgaaacgaccggtgatatgctgcttgctattcaccagaatatcgagaaacataactggatgctgaaagcgtatttaggataatcaacaagggaagaccggggctataaagcactcggtcttttatttggctgccgaagagaggtgttgtccatttttctgaaaaatccagtccgttccattcacttttcatagaataatgtaaggccgtttctgtgaaaggatgttggatcaagtgggcaaagactttggcatcttttcgttttttgcagtgatcgtgtcggcagcggggtttttcttcggaggttttcagtattcgtttctgattttgctatcggtcatggcgattgagtttatcagtacaagcttaaaagaatctcttttgcagcagctgagcgcaagaaagctttttgcgcggctggtcaaaaaaatcgtgactctggcattagtctcagtttgccatttttttgaccagctgcttcataccgaaggcgccatccgtaatttggctatcatgttttatatcttatacgaatctgttcagatcgtgattacggcaagctcgctgggcataccggtcccgcaggtgctcgtcgatctattggataccctgaaaaataaattcaagcgcaaaccgtaacatttgcttcaaaggaggctatactagcgggtatgatggttttcctctgaatttttgataaagggcttccgaacaaacgcaactgtggtatgatgtatggaagatatgaaggaacggattagagggataaacatgtacgagtttaaagactattatcagaacactgttcagctctcctttgaacaccagcctttttcagacagcccgaagcacgtatgggtcatatgccgatacggtgataagtggcttttgactgagcacgaagaccgggggtttgaatttccgggcggaaaagtggagccgatggaatgtgcggaggaagcggccctgcgcgaggtgaaagaagaaaccggtgccgcggtaagacatctgaagtacgtcggacagtataaagttctcggcagggaaaaggtaatcgtgaagaatatttattttgccgatattgaaaagcttgaaaaacaggctgactattttgaaacaaaggggccggtgctgttcagcgaactgccggagaatctcccccgaaataaaaaattcagtttcattatgaaagattcggtgcttccgatcagtctgaaaaagctgaaagaagacggcgtatttcaatcataaaaaacggagacccggcgcttacgcacgggtcttttttatatttttcctttcgtccattttctttctaacagttcgactccctgatacatcaatgtcgcaaaaatcgcgatgatcagaaggcttaagaacacaagagtgaaattgaagacctggaatccgtaaatgatcatgtagcccagacctttttcggaaacgagaaactcgccgacgatgacaccgacccaggataaaccgacgttcactttaagcgcggaaataatcgcaggggcgcatgccggcagaatgacttctttaaacatgatgcttcttttcgctccgaaggttttcatgaccttaatatagttttcatccacttcctgaaaagccgtaaagacgacgattgtcgtgataatgacactgatgactgctcccatggcgacaatgcttgtgaaattcggtccgagtgccacgatgagaatcggtccgagtgcgaccttcggcatcgcgtttaaaatgacgaggtacgggtctaaaacccgggcgagcctgtttgaccaccataacagagcggcgaggcatgtgccgaggagcgtgccgagcaaaaagccgagaacggtttctcctaaggttacgccgatgtgcgccgcaagggatgcgtccgcaatcttttcaactaaaagcctgcaaacggcggagggtgagctgaagattaacggatcgatccagcccgccctgctcgatatttcccatccggcaaaaaatacgatgaaaatggcggtctgatacgcacggatccggagcttttctttttggtgtcttttcttaaactgctgatgaagctgttcaatcgagccgctgctgtttttcaagggaattcagctccttccatatggtttgaaacagcggctgaaaggccggatcctgacgcgcgtcaaatggatctaaagccgcgagctccttaggcacggtgaatatttggtggatggtgcccggctgattcgaaaataaatagatcgtatcgctcatggcgatggcttcaccgatatcgtgggtgacgagcacggcggttttttgaaaatcctttaatgttctgaagacaaggttttccaaagaaagcttcgtttgaaagtccagcgcggaaaacggttcatcaaggagcagcagtcccgggtccggcgcaagagttctggcaagtgccgcccgctgccgcattccgcctgacagctctttcgggtatttcttttcaacgccgattaatccgagcttaggcagaaggctgagaacttcagctcgtttttcttctgttaatgtttttgaaatgtgtaaaccgagcagcacgttttcctcaattgatttccaaggaaataaataatcctgctgaagcatataaccgatttggtgttctttatggttcggcacgcttccttcaatcagcacccggccttgcgcaggggtgataagcccggccagaatggacaggagtgttgtttttccgcatccgctcggtccgagaaaggagatgaaatcccctttttcaatctgaaaatgtatatcttttacggcggttgttctttctttcagcgagaaataagtatgtgttacatgatcgacatgtaaaaaagacattcatgttcctcctattgttctgaggtgacttttttggcgatttttgtgttgacgagtttgctgtacggaatatgtttcgggagctctccggcttcatccataatagattgaagctgttcccattcatccttttgcagaactgggtctgcagagaatgacttttgttttttatagcgctctattgatgtttcgataatggccggatcggtatcggcaaattccttctgaatcgtttttgcgatgtctttggccggatggctttccacccattgctgggcgcgatagatggcgcgggtgaatttttccgccgtcttttcattggttttcaaataactttcttttgccataaaggttgtgtatggcacttggccggaagcttctccgaaagatgcgacgatatggccgatgccttctttttcaaactgggatgccgtcggttcaaacagctgcacataatcacccgttccggatgcgaatgcgttggaaatattggcgaaatcaatgttttgaacgaggttaatgtcttttttcggctctatgtgattcttttttaggacgtactcaccggccatttggggcatgccgccttttcgctggccgagaaatgtttttccttttaaatcgctccatttgaatgatttctcatccttccgcgacacgagaaatgtgccgtccgtctgtgtcagctgcgcgaagttgatgaccggatcttttgctccctgcgcctccacgtaaatggatgtttcagaaccgaccagcgcgatatcagacccgtttgacaaaagcgatgtcatcgttttgtctccgccccatgttgtttgaagtgacacttggagcccttcttttttaaagaaaccttttgcttcagcgacatacataggcgtatagaagatggagtgtgtgacttccgccacctttaccttcgtcagactttcttcctgtctgcaggccggaagaatgagcaggaaaaaggcgcatatgacaaaaacgcagcccgttttgagccatttgttcacggtgtaacctccttgttttaagcgttaaaataaccttttctgctttacatatcgtatgatgggtataaaaaatgtgtgagtgcccatattcacgttgggaaagaataaaaaaactgatgatataaggaggctcattgttttgctggcagaaaagaaaaggttcccgtctccgagtccgcatgtccgcctctttgagatatgctatgagtcagaagggctgaaggtaaaggggctccttgccgagcctgcggagccgggcacatatgatggttttttatatttgcgcggcggcataaaaaatgtcggcatggtacgccccggaagaatcgttcaattcgcttcccaaggctttgtcgtgtttgcgccttattacagaggcaaccagggcggcgagggaaatgaagattttgcgggagaggacagagaggacgcgttttccgcttttcgactgcttcgggagcatccgaacgtcagggaagggcgggtgcatattttcggtttttcccggggcggaatcatggggcttttgaccgcgattgaaatggggcatcaagcggcttcgctcgtatcatggggcggtgtgagcgatatggtgcttacttatgaagagcggaaggatatgcggcggatgatgaagcgggtgatcggcggcacgccgaaaaaggtgccggatgaatacagatggcgttcgccgtttgaaaaagcagaccgcattcaggcccctgtgctgctcatccatggagagaatgatgagaatgtttcgatcgaacacgcccggctgatcgaggacaagctgaaagatgcggggaaaccggtggaaacttggtattacagcggttttacgcattattttccgccgcaggaaaacagacgcattgtccggcggctggcagaatggatgaagacgcggtaagatgcctgatttatgatatgataataaagaataagagaatgaaaggggattttcattttgggaatgcctgttgaatttaataccatgattgtgacaaaaggcaatgaaaaacggatagaggaaaatatctttttattggagaaagagggctaccgcgtctatcctcttgatattccgatggacgtgcgcaaaacgaaaaccggcgagaaatccggcaccggcgaggtccaaaagctcgaatgggcgaacggccggacaagcattacatacagactcacgtcgcttcattcgacaaactgaaaaaacaaaagccgagggcataaacgcccttggcttttttgattacacgagaggtccgccggctttggcaatcgagtctgcatgggaaaactttttaaagttttctttaaactcattggctaaaaacagcgctttttcgttgtatgcttgtttatcgctccatgtgttttcaggctgaagaacttcatccggaacgcccggaacatgaacggggctgcgcaggccgaaaatgctgtctgccgtcatgtcagtctggttcagtctgccttcaatagcggccttgaccatcgctcttgtatacgaaagtttcatccgttctccgactccgtaccctccgccggtccagcctgtgttgaccaggaagacttgaacgccgtgttcgtcgattttatgcccgagcatttcggcatatacatgtgccggaagcggaaggaacggtgaaccgaagcacgtcgagaaagtcgtttgcggagatgtcacgccgcgttcggttcccgcgagtttactggtgtacccgcttaagaagtgatacatcgcctgttccttcgtcagtttgctgatcggaggaagcacgccgaatgcgtccgccgttaaaaagacgatcgcctgcggatggccggcaatgctcggctgcacgatattgccgatcatctcaatcggatatgcggctcttgtgttttccgtgtagaaggaattgtcgtaatccgcttcacccgttttttcatcaagcacgacattctcaagaacagacccgaagcggatcgcacgaaaaatctgcggttctttttcctcgctcagattgatacatttagcgtaacatccgccttcaatgttgaaaacgccggaatctgaccagccgtgctcgtcatcgccgatcagtttgcggtctgcatcggctgaaagcgtcgttttccctgtgccggaaaggccgaaaaacagggcgacatcgcctttttcaccgacgttggctgagcaatgcatcggcagtatatcctgctgcggaagcagaaagttcataatggagaatattgattttttcatttctccggcgtattcggtgccgccgattaaaatgacgcgcttttcgaaagagacaatgataaatgtttccgaatgcgtgccgtccgtctccggatctgctttaaaatgcggagccgagagaatggtgaaaggctgcgcttgcggatctctttcatccgtctccggtctgataaacagctggcgcgcgaataaattgtgccacgcaaattcatttacgaccgtaatcggcagtctgtatttttcatccgctcccgcgaatccttcaaaaacaaacagttcatcccgctgttttaagtagctgacgactttggcgtacagcttttcaaacgcctcttcagaaatgggctgattcaccgcgccccaatcaatttgattttctgtgctttgttcacggacgataaatttatctttaggtgaccggcctgtatatgcgccggtggtggcgcgtacggcgcccgttgatgtcagcgttccttcatttcggctgatcactttttcggtaagttttggagccgataaattatgatgcacattcggacttgcaagtaatgtttgaagatctgcggttaaatcaactaatttcataaaaaccttcctttgccggtttatttgtatttcgctgaatgtggaattagtataacatatatctgaaaatagtctatactatttgaggttttttgtttgtgtttttccattgcttcccgaaataaaggcgcgtaatcgctttaattcatattgacactttccgcccttttacgataagatatttcattgagcggatactcttatcccgagctggcggagggacaggcccgatgaagcccagcaaccggtttctcgtaaaaaagcaggtgaaaacactgtgggaaaccaaggtgctaacctgatgcaaggtttaatattttccttgagcgataagagtgaaaggcacacagaccaaaccctttcctcgagtggaaaaggtttttttatttcataaaatatgccaattaacattctctgatatagtatgacattgtattaagagggagcgagttccgtatcatatgagaaggtcttgtaaaagatcttttttcaggaggaaaagtgaatgagtaaaaaccgtcgactatttacatctgaatctgttactgagggtcatccggacaaaatctgtgaccaaatttctgacagtatcttagatgagattttaaaaaatgacccgaacgcgcgcgtggcctgcgaaacatctgtaacgacaggacttgtgctggtaagcggagagattactacatcaacatacgttgacattccgaaaacagtccgtgaaacgattaaagaaatcggctacacacgcgccaaatatggatttgatgcggagacttgcgctgttttaacatcaattgatgaacagtctgcggatatcgcaatgggtgtcgatcaggctcttgaagcgcgtgaaggcacaatgagcgatgctgaaatcgaagcaatcggagcgggagaccaaggcctgatgttcggttatgcgtgtaacgaaacgaaagagcttatgccgcttccgatctctttggcgcataaattagcccgccgtttgagcgaagtccgcaaagaagacattcttccgtaccttcgccctgacggcaaaacgcaagttaccgttgaatatgatgaaaacaacaagccggtccgcatcgacgcgatcgtcatttcaactcagcaccacccggaaattacgcttgagcagattcagcgcaatctgaaagagcatgtcattaatcctgtcgtgcctgaggaactgatcgatgaagaaacaaaatacttcatcaaccctacgggacgtttcgtaatcggcggacctcaaggtgatgcgggtctgaccggccgtaaaatcatcgttgacacatacggcggatatgcacgccacggcggcggcgcattctccggtaaggatgcgacgaaggtagaccgttctgcggcatacgctgcgagatacgtagcgaaaaacatcgtggcagcaggtcttgctgattcttgtgaagtgcagcttgcatacgcaatcggcgtggcacagcctgtttctatttccatcaatacatttgatacaggaaaagcttctgaagaaaaactgatcgaagtcgtacggaataacttcgacctgagacctgccggcattattaaaatgcttgatctgcgccgcccgatctataagcagacagctgcttacggccatttcggacgtcatgatgtggatcttccttgggagcgtactgacaaggcggatgcgcttcgcaaagaagcactaggagaataattttatagccgcttacttaagcggctttccctttttgtagatgctgccatgcttattttttacatagcgtgaaaccaatggcgtaacaaagcgtctataaaaagggggtccaattagaaaattacacttatggaggctatactatgtgtggatttgtcggtgtttttaataagcatccattaactcaaaccgcagatcaagaagagctaatcaaacaaatgaaccaaatgatcgttcaccgcggtcctgacagcgatgggtattatcatgacgagcacgtcggattcggcttcagacggctcagtattattgacgtagaaaacggcggacagcctttatcatatgaagacgaaaaatattggatcatttttaacggcgaaatctataactacattgaattgagagaagaacttgaagcgaaaggctacactttcaatacagattccgataccgaagtgctccttgcgacataccgtcattataaagaagaagccgcttcaaagcttcgcggaatgtttgcgtttttaatctggaacaaagctgaccgcgtcatgtacggcgcgagagacccgttcggcattaaaccgctgtattacacaacgatcggggacaaagtatattttgcctctgagagaaagagtttaatggccgctcaaaacggtattgatctcgatacagcttctttacagcaatatatgtctttccaattcgttcctgaaccgagcacgcttgacgctgaagtgaaaaaagtcgagccgggcagccagtttacgatccgcccggaaggcgacatcgcgtttaaaacatatttcaaagcgaactttaagcctgttcagtctgatgaagataaattggtgaaagaagtcagagacgcaatctttgactctgtcaaagtccacatgagaagtgacgtgcctgtcggttcgtttctatccggcggtatcgactcttcttttatcgtctcagttgcgaaagaatttcacccgagccttaaaacattttccgtcggttttgagcagcagggcttcagtgaggttgacgtagcgaaggaaacggctgccgcgctcgggattgaaaacatcagcaaagtcatttctcctgaggagtatatgaacgagcttccgaaaatcgtctggcactttgatgacccgcttgcagatccggcggcgattcctttgtactttgtcgcgaaagaagcgaaaaaacatgtaacggtcgcgttatccggggaaggcgcggacgagctgttcggcgggtacaatatttaccgcgaaccgctttcgcttaaaccgtttgaacgcattccgtccggtctgaaaaaaatgcttcttcatgtggcgtccgtcatgcctgaaggaatgagagggaaaagcctcttagtccgcggctgcacaccgcttgaggagcgctatatcggtaatgcgaagatttttgaagagcccgtgaaaaaacagctgctcaaacattacaatcccgagctttcataccgtgatgtcacgaagccgtactttacggaaagccgttcatacagcgacattaataaaatgcagtatgttgacatccatacgtggatgcgcggcgacatcctgttaaaggctgacaaaatgacgatggccaactctttggaactgcgcgtgccgttccttgataaagtcgtgtttgacgtggcttctaaaattccggatgaactgaaaacgaaaaacggcacgacgaaataccttctgcgcaaagctgctgaaggggtagtgcctgatcatgtacttaaccgcaaaaaactcggcttccctgtgccgatccgccactggctgaaaaatgaaatgaacgaatgggttcgcaacatcattcgtgaaagtgaaacagatgcttatattgaaaaggattatgtccttcagcttctggaagatcattgtgccgacagagcggacaacagccgcaaaatctggaccgtgctgatcttcatgatctggcacagcatcaatgtcgaaaaaagacttgtgccggaagagctgaatcatcagccgaaagaagtcattttcgtttaatccaaaaggctttcgatgttatcgaaagccttttttctattgttcttttgtaaaccgtctattccgctctgttttcgacaaagtattacgcaatattcagaaaaaggttataataggactaatcgggtagattccggaacttgttttctggctatttcgtctcggtttgttgtttctttgtcaaaatcagggggagggagagttatgcaaaacaaagaaaaaacgcttcaccgcggcttggaagagcggcatatctcgcttatgtcgttgggcgccgcgataggagtcgggctgtttctcgggtcggcttctgccataaagcttgccgggccggggattttagccgcttacgcctgcagcgggctgattatgttttttattatgcgggcattaggggaaatggcgattcaaaagcctgtagccggctcattcagccggtatgccagagattatctcggtccgcttgccgggtttttaacaggctggaattattggtttttatgggttgttacctgcatggcggaaatcaccgcggtcggcatttatatgggctactggttccctgacgtgccgtcatggatctgggcgctttgtgcactcgtcattatgacggctgtcaactttctggcggtcaaagcgtacggtgagcttgaattctggtttgcgctcattaaagtcttggcgattctgtcaatgatcgcgatcggtctggtgatgatcgtattcggtctcggaaatggaggcgttgcgctcggaatcagcaatttatggagccacggcggctttttcccgaatgggattaaaggggtgctgctgtcgcttcaaatggtcatgtttgcctatctcgggattgagctgatcggtgtcacagccggtgaggtcaaaaatccggaaaaatcactggcgcgggccatagatactgttttttggcgcattctcattttttacgtcggagctttgtttgtcattatgtcaatttatccgtggcaggaaatcggttcaggcggaagcccgtttgttttgacatttgaaaaaatcggaatacccgctgcggccggaatcattaattttgtcgttttgacggcggctctttcttcctgcaacagcgggatcttcagcacggggcgcatgctgtttaatctggcggagcaaaatgaagcgcctaaagcctacggaacggtcacaaaaggcggtgtgccgggaaaagcggtattggtttcagcgggcgcgttatgcatcggcgttttgctgaactacgtggtgccggcgaaagtgtttacgtgggtgacgagcattgcgacgttcggggcgatttggacatggtcgattattttgctttcccaaatgaaataccgtaaaagcttacagccggaacaacggaaaaaactgaaatataaaatgcctttataccccttttcctcatatatctcgctggcatttctggcttttgtcgttgtgctgatggcttttgatgcagagacccgggtggccgtcatcatcggtcctgtctggttcggcatattattagccgcctattacgggaaaggcttccacaaaagaaaacacataaacctggaaaacggacagacattcgccgaaaaagcgtaaaaaaagagcccgctgaaatgggctcttttttcataggatcgggtaaaagggggaagaataaaacaaattcctgaacattttgctactgtttcctgacaatcagcggaacgcaaatggttattacttaaataatattttgaaaaatggtacagtagtaaaacaaagctgatctatttttatttctcttgcagtgttttatagtatcggcctttttcaacatattccgttctgattctttccatgtcccgtatgtcttcttctgtcagccggcggataacctttgcgggccggccgaacgcaagacagccgggaggaatggttttgcccggaggaacgagacttccggcgccgataaatgcgctttctccgatttccgccccgtcaagaatgacggagcccataccgattaaagcattctttctgatgattgcgctgtgcagtgtaacctgatggccgatcgtgacgtcatcttcaataagaagcgggcggttcggactttgatgcagacagctcaagtcttgtatgctgactctttttccgatccttgtcggcgcaacatccccccggatgacggctgagaaccaaatgctcgattgttctccgatcacgacgtcgcccgtaatgacggcgttatccgcaatgaacgcttcaggatgtatgtcaggcgtaaattgtttataagggtagattatcatgtctcatccttctttctctaaatttatgtaagaggtgaactgcatgtggacttggaaagcagacaggcccgtcggtaccattgtcattatccacggggcgagcgaataccacgggcgctataaatggctcgttgaaatgtggagatcttccggatataacgtggtgatgggcgatttgcccggtcagggaacgtcgacccgcgccagagggcatattcgctctttccaagaatacattgatgaagtagatatatggattgataaagcgagaacgcttgaagcgcccgttttccttttgggccacagcatgggcggactgattgcgatagaatggtttaagcagcagagaaatccccgcattacggcactcattttatcatcaccttgtctgggtctgcaaataaaagtcaataaagtccttgattttgcgtctaaaggactgaacgtcctcgctccgtccctcagagtggattccggcttatcacctgatatggcaacgaggaatgcggatatgattgaagcggatcaaaacgattctttatatgtcacgaaggtatccgtaagatggtacagagagcttttaaaaaccattgatgccgctatggtgccgactgatgcgtttttaaaggtgccgcttttgcttatgcagggcggtgatgacaaaatcgtcgataaaatgaaggtccgcaaatggttttccggtgtggcttcccataataaatcgtaccgggaatgggaagggctttatcatgaaatttttaatgaaccggaaagagaaactgtgtttaaggcggcaaaagcctttacagatcagtatatttgaattcgctgggggtgcatatgttgacagtaccggaacatccttttaaccttatggcaaaagtgtatcgggaaatttttccgctcgttcatcaggaattgaacatgtggcgggaaaaatcagattccattaaaaataccgaactgcggcagcaggcggccgcaagtatccgcgataaatcgtttcattgtgaaggcggcggcattttagccctgctttcgggagagcagaaacagaaatgcgtgcaatttatcatcgcgtatcagacaatcagtgattatctggacaatctgtgcgaccgcagcacctcgcttgatcccgaggacttccgcatgcttcatctctccatgcgtgacgcgctgacggtcggcgccgaggtgcggccgtactatcagtacagagacgagcgggatgacggcggttatcttcatgagctggtgagaacatgccagcgggtgctcgggtcaatagaacattacggtatcattaaaccttatttgcttgagctgtgtgattattattgcgatcttcaggttcataagcatgtcgttgagcatgaacgcgtgccgaggcttaaaggctggtttgagcagtaccggtcacagcttccggaaatggagtggtttgagttctcggcctgcgccggatcgacgttaggcattttctgtctcgtcgcttactcattccagtctgattttaacgaacataccgctgagaaaatccgcagcagttattttccgtacatacaagggctgcacatactgctcgattatttaattgaccaggaagaggatctgcttgaaggcgatctgaatttctgtacgtattatcagtctcatgaagaaatgatgcagagactgcagcattttattgaaaaagcggatgaacatttgcaaggcattccgcatgaaaattttcaccggctgatcaacagggggctgctcggcgtctatttatccgatgacaaagtcgccggccaaaaagaaatgggccgcctcgcgcgaaagctgatcagggcaagcggaaaaacgtcatttttcttttatatcaacggaagagcctaccgcaaatttcagaagatggcttggacgaaaagttcgtaatgggtgaaagtgcttacgcttaatatttctgatgaaaaagagacatgcgcattttacgctgtctctttttttaacggtttcttttttgctgcaaggtgcattgcgaatttgccgatcagcccgatgacaaaaaatgcagcaaaccaccagtaataggtttttgcgaactcaaatcctaaatgtcttgataaaatgatgacgaacatcacatagggaacacttgaaaatatgatgcgaagaatattcaaactgccgctcctcccagatgttacacttaaaagatgtgctttttttccattatttcatagtaattgatttttcttgaaaagtaaacacaaaaagaatcggcccgcttatgacaggccgattctttatttgccggcagatttcttttcaatcgctataataaacggagggtcgtttcgctggttgagaaagccgtagctcagcacgcgcgctttttcctgatcaagattgctgcagtactccagtaatgcacttttttccgtcttgccttcgggatgcccgtggtacacaacgagaacgatcagcccgttctccttcagcagttcaaggagctgttcgatcgcggaaatggttgagtgaccgtttgtcgtaatgcttttatcgccgccgggcagatagccgagattaaacacggcgcaagccacacgaccgtgcgcatcttcaggcagcgatgcctttatttgatcatggctcttatggtgaagcgtgacgcgcgggccgaagtcggcaccgagccgctccttcgttttagcgagtgcgtccgcttgaatatcaaaggcatggacatgtcctgtctcaccgacaaggccggccaggaaatatgtatcatgtccgttgcccatcgtcgcgtcaaccgtgatatcaccttcttgtgcggcggacttcagcaattctttactgaaagggaggatgtgcattaaggtcatagggcggtctcctcctcgatctttctgaagagcttcccttgatagcttccccgtgtttccagctctttttgaatggcgcccagtacttcccacttattgacgctccacatcggtccgaccattaattcgatcggcccgtctcccgtaatgcggtgaacgatcatttccgggggaatgatttcgagctgatcacatacaagacttacatattcttcttgagaaaggaactccaactttcctttttcatattgcttcaccatcggtgtgccttttaataagtgaagcaggtgaattttaatgccttgtacatccaaatcagcgacggctttggccgtctccatcatcatgtccctgttttcaagcggaagcccgttaatgatatgggaacaaacgcggatgccgtgttttctcagtttattgacaccctcaacatagcagtcaaaatcatgggcgcggttgatcagaagggcggtccgctcatgcacggtctgcagcccgagttcaacccacaaataggtccgctcattcagttcggccaaatattccacgacatcgtccggcaggcagtccggacgggtcgcgatcgacatgccgacaacgccgtcaagcttgaggacggattcgaatttttcacgcagctcctctaccggggcatgcgtattcgtgaacgcttggaaatatgcgatatatttgccgtctttccacttttcgtgcatgcggtttttgatatcgtgaaattgcgtgagtaagtcatcggcccgattgccggcaaaatcgccggagcccgccgcgctgcagaatgtgcagcctccgtgtgcaaccgtgccgtcccgattcgggcagtcaaaaccgccgtcaagcgcgactttaaacactttatgcccgaaatgctcccgcagatgataatttaatgtatggtaccgtttttccgtatttgaataaggaaaagggttattctcgttcaatgttcaaaaagcctccctcacatcagatgcatcctaaaattgtagcatgaatgatgggggttcacaatctgaaaacaggatgcggctttcttttgtttattatgactgcaggcaggattctcattcttttaacttaaacacggaaaatttggttctctttccttcaaccttcgggtgttattatttttggtccgctcaaactaagtttgatttcccattcactgaggaggggtttcgttggcaacaagacaatcagtagatgaacatctccaaagaagcgaacaggcgtatgaatttgcgaatgagcaatttatgaccgcttcgaaacaagagcattataatgataatgagtacagtgaagcgcaaatgatgcttgaaaacgcggtgaatgaattaaacaagctgtcattatctgcgaatgatcagcaaagagagcagctttatcgaatgagattgcagctgcagaccttgcaaaacaatatgattttgcagcgtaattttgattactgaccgcgccgtttcaaatggttcagcaaacctgccggaatcccggcgggtttttttgtatttttttaaaaaaagaattgacaatagggcggagtgtgtttattgtattacgtgtactacttgatgtaatacacataaaacactcaaaaaatgaaatcgacatataaatgttaagcatagggaaggggaactttcatgaaaaacaaaagatccgtaaaacaagatgtgcctcttattatcgccgcctcggttttggccagcagtctttttgtcgttcttgtcgtcatcggttttcaatggcagaacatttaaagaaagagagcagctcgtaaaagaaagaagggaagtaaatgattcaaatcgatccgagaagctcaactccgatttatgagcagatcatacagcaactgaaagagctttgtttaaaagggatcatgaagccgggggataaacttccttctgtcagggaattggcaacgatcattatcgccaatccgaacacagtcagcaaagcgtacaaggagctcgaacgcgatggtgtcattgaaacgctgaggggaagaggaacgtatatatcggagaatgcaaaaacgacattggttgaagggaagatgacgatgataaaagagcaattgaaacagctcatcatcgatgcccattacgcgggagttgagctggagaagctgcaggaatggataaaggaaatcagcgctgatgtgaaaggaggcaaggatcatgattgaattacggaatctctcaaaaacgatagacggtaaagaagtgctcaaggatatttcgctcaccataggaaaaggggaaattttcgggctgctcgggcgaaacggatcagggaaaacaacactgctccggctcattcagcagattctgctgccggatcaagggacggttttatttaatcaggtggaaataaagcggcatccgaaagtaaaacagaacatcatttatatgcctgttgaaaatcctttttatgacaagtatacatataaacagcttgttgcgattgtaagcagaatctatccgaattttgatgtgacttacgccaatgagctgatgaacaggtacggcattccggaaacgaagaaataccgtgaattatcgacaggcctgaaaaaacagcttgcgctcgtccttgcctttgcttcacgcccggcacttattcttttggatgaaccgacggacggaattgacgccgtaacgcgtcatgacgtgctgcagcttatggtggatgaagtggctgaacgggaaacgagcattctgattacctcacaccgtttagaagatattgagcgaatgtgcaaccggatcgggtttttggaaggaaatcagctgacgaatgtgatggacttggatgatatgaaggaagagtacatgaaaatccaaatggcatttgaagaaaacgtcgccttgaagatcagagaacaaaacataccgattctcgaccatgccggtgtgttttatacggtgctgattcaaaagaacgatgaaaagaaaaagaactttctgcaagagctgcagccgaaagtatggaacgaacttcctgtgaacttagaagaagtcttcatcgcgaagtttggagggaaccggagatggtagacaggggattgctgtacagggaatgggtgcagaatcgagctgttcttgtgatggtcggcatttttttagcggcggtcaatccatttgaagtgttaaatacctatctggtctatcaaggctgtctggacaccccggaagcatattgtaacttttatgtgaattctctggagagcggaatgctgaacttaaactgggcgcccgctgtgattttggcggtttgcttattcggactggagcgcacaaaaggtacgattgatacgcttttcagtctgccttattcccgcgctcaggtgtttcacactaaattttggctcggggcggcggtcattaccggcgctcaggtgatcggctacgggctggctgagctgctcattcttctgttaaagcctgagcgcgtatatttcttccatcattacagcgtcggagagattattgtgagtgttttggcttttacattggttgcgagcgcgggctgcttaacggggaatacgttcgcccagctgttaacggcgtttgccgtgtcgatagcgccttacctgattattacgttgccgctgacaaatgcggaagttatcttcagggtcggcatgcatgagctgatgccatcagtcaatgcttacctaaacgattcgtttcaatatctgattccgatcatgtatgttaatacggactgggtatctgccagcaagtatttattaatcattccggcagtgatgagcattgtattttatgccatcgggtacttttgctatgtcaggcagccggtggaacggaacggccgtttttttctctggagacagcttgaccggcccattcagattgtggtgatcataatcgccgttctcggttttggcctggcggggtactcgacgggacatacgatgacagggtatgtggccgggatgctggtcggaggagcgatcggatttttggtcagttattttgtgatttataaaaaaacgaagcatgtgtaagagaggaggaccggaatgataccgcggggattgttgtacacagaatggaaaaaaaatcagtggttgtttttatgcagcggcattcttttaatggcggcaaacccttttatggtttataacaactactcaacatatcaagaatgtttgaataacccagctcttcaagattgtgaattcgttgtcaattatacgaatgggtcgcctctttccttcagctgggttgtgagtgtcatcattgctgtcttcttattaggcttggaacggacaaagggaacgatggatgctttgttaagcatgccttacagcagaggccaaatctttcagacgaaattctggctcggcggggccgtcattgttgttcctcaggcgataggctatggagcggcgtcattgctgatatctttgctgaaaccgagccatacgtacgattttgatcatttttcaatcggaatgattgtcatcagttttatggcttacgccttgttaatggcatccggcgcattaacgggacagatattcgcccagctgttaacggcgtttacagtaacggttctgccctttttactcatcggtctgccggccgcgaatttggaggtcgttttcgattttagtgtcggagatcaattttcttttatcagcagttatatcgaatcccgtctttttatatttgtaacccctattggatatgtgtttaacgactggatcagagaaagagatttggttttaatcattccgattgtgatgagccttgtcttttatctgatcggttatgtcagctttctgaaacatccgaatgaacggaacggcagattctttctttggagaaaattggaccggccggtgcagatcttggtgattgcctttgctgttatgggtttcggcgttttcggatatggggtcacagacacgatgttcggctatttagccggcattatcttcggcgcgattatcgggtttttcatcagttattttacggtttacaggaagtcaaagcatatgtagatctgtttgaaaatgaacagtttggaggaaggcaaggtgccgattagcggtttgctttataaagaatggaagcagcggcagacgctgctgcttcttacagcggggttcttagctattttaggccctttggcaattataaatgagtattttcactataaggattgtttgagtgcgcttcatcaatattcaggttcagtttgtacgttcagcattgattacagcaatcggaatttgattgggctgcatttcattcctccggttatgatggggctttttctgataagaggaggccgggctgaaaggatgtttacactgagtcttccgtattcgagaagccggatatttcatacgaagtttttcttgggagcagccgtgttagccggctcgcagtttgtttcttacggagtatctgacatattgtttctagcgcttaaacctgacgctgtccatcattttcaatcgttcagctcagggatgctggtcatcagcttgatgatttatgcattagtgacagctgccggcacgataacgggcaatttagcggcgcagctgatcacagcgttcacggtttccgtctttccgatcgtggttatgacgatttacctgttaaacgctgagttcctttttggcaggcaggctgtgccggatattgatttcccttggagcgggtttctgatctatttcatgcctgccgcttacatccatatatcatggatgtattacatgaaacacgcattgttaatctccgcattaatgggattttgtttctatctattcggctatgcgaatttcctgaaaatgccgagtgaacgaagcggacattttatcctaagcaaacacattgaacgcaccattcaagtgctcgtcatggtgctcagtatgctgggaagtgcgggggtatgcggatatgcttataacggttcgtataccggttacatattcggcatgcttatcggcgcggttatcgggtttttcatcagttattacttcatctataaaaaaacgaaacagatataagggggagtggtgtacgtgatagaagtacagcatattgatcattcatttaaaatcggcaggaaaggcagagagagtgaggttccggtattgaaggatgtctctttgaccgttgaaaaaggggaaattgcctgtatcgtcggtcggagcggttccggaaaatcaacacttctgaatttaatatccggatacatagcgccgacgaagggccgtatcgtcattaacggcactgatgtgacgggcttcagtgaaaaagagtgggcgcagttccgcctcgggcatttcggctttatttttcaaagttttcagctcattccgagtctgacaacctatgaaaatgttgaaatgccgcttgccttaaaaggcgtcaaaccgtctgaacgcaagcagaaagtcgcggacatgctgaaacgggtcggacttgagaatcatgcgaatcattatccgaatgagctgtcaggcggccagcagcagcgtgtcagtatcgcaagagccctgattttaaatccgtcgattattttagctgatgaaccgacgggaagccttgattcagaaacggaacttgaggtgcttgcattaattcagcagctgaaccgggagcgcgggattacatttgtcatcattacgcatgacgatgaagtcgcttcgatcgcgcattcaaaattccagctgcatgacggtgtattaaaagggggcgttactgttgagatttaaggatcagattcactttatcagaagaaatatgaagaaaaaccggctgcgtgttttcatgacggtgctggcgacgacaatggcgtgcgcgtttttagtggtgctggcttccgtcggattcggcatccaaaaaacgattacagacattacgatgagccagcagattgttacggaaatcaacgtactcggccaagaaaacggaaaagccgtgaagaaatcagacttggaaaagtataaaaatgtcaagtctgtcgttgagagaacacaagtgtatgaaccgaacaaagcgtcattgggaaaccgaacaaatgaagattcagccattgtgctgacaaacatgaacgatgaagtcaaagccaatatggagcttgatcagggaagggtcgcccgtacagagaatgaaatcgtggtcggctatgattttgcgaagaacctattgacgaaaaaagagtctgacgcttacgacaaagagttaaaggatcaccaaggcgacatgtcggaggtgaaaaaaccaagaggctatactaaagacctgcttaataaaacgatacagttgagcatctccaaaacaaacaaagacggagacgttgagaaaacgaaaacgtacgactttaaagtagtcggaattacaaaaaaaccgtcccaagattggatggaggatacaaatatttttgtgagtgatcaattcaagaaagacttctcgacattcttggatctgaagaatggaaatgcggaaaaaagcatcaatgtgtatgcggacaaattcgatcatgtcgatcagcttacccatgacctcacggatgacggcttttatgtcagatctgtcactaccgagctgaagggcgtcaacacctttttcctcgtctttaaaatcggcctgatctttgtcggctttatcgccgtcgtgatttctgctatcggtattttcaatacgatgacgatggcggtgacggaacgaacgcaggaaatcgggattatgaaagcgatcggcgcaagcccgtccatcatccgcagaatgttcctgatggaaagcgcctatatcgggatattaggttctgtcatcgggattatcatttcttacggagtgagttttgccgtcaatctggctgtgccggttatcttaaaagcggtagggggaaacaccggagctgaagatcttcattataccttctcctatatcccgctcagcctcgttgtgatcgcagttgtcatttgtgcgggggtcgcggtgatttccggtatgaatccggcccgcaaagcgacaaaaaccaacgttctgaccgcattaagaagagaactgtaaaggaaaaaagccggctggacatcagccggtttttcctctatttatcagaaaagggcggataccatgtttcacattttgttaatagaagatgataacactttatttcacgagatgaaagagagattaacgggctggtcatttgcggtgcacggaataaaagatttcagccgggtcatccgggagttttccgaaatcaagcctgatttggtgatcattgatgtacagttgccgaaatttgacggctttcattggtgcagaatgatacgctcccaatcaaacgtgccgattctctttttgtcctcgcgcgatcatcccgcggatatggtcatgtcgatgcagctcggggcagatgattttattcagaagccttttcactttgatgtgttaatcgcgaaaatacaggcggtgttccgccgtgtgcatcaatacggcacagaaccggcgctgatgaaaagatggtgcggggcggtcattgacacagaaaccaacacggtcagccgtaaaaacggttcggtcgagctgaccaaaaacgaaatgctgatcttaaaactgctggctgagcagaaaaataaaatcgtcagtcgggaagaactcatcagaagcctttggaatgatgaacgtttcgtcagtgataatacgctgacggtgaatgtcaaccggctgcggaaaaaactcgaacaattaggcatcgggaaaatgattgaaaccaaggtggggcagggatacatcgcaaaggaagaagacggtctttatgattaaatcatttctgctcgaaagaaaaagctggattgcgatgtttcttttgcagcaggctgtgctcctttttgcggcatatattgatccgtctattccgtttctttcagtgctgtattttgtttacctgtcgcttcttgtgtttcttgtatttctcttgttccgctatcgtaaagagaccgcctattataaaagcttaagagagtgggacgccaatttagacatgtcttatcttaaagcgcctgacagtccgtttgagtctatcgttgaagaaagcattgaagggcagacagagcagttaagaaaaagctcacttcaccttcaggcggcgtcagagcatgaaaaggacgatctgatgtcatggattcacgaggtcaaaacaccgctgacagcgatgcatctcatgattgagcgccttgatgaacagccgctgaaagcccctttgctgtatgaatggctgcggattcaccatcttctggaccagcagcttcatcagaaacgattgtcctttattgaaaatgatttatcattccagcgcattcagctcagaccgctcgttttcaaagaaattaaaaatctgcaatcatggtgcatacaaaaagggatcgggtttgacattcagcttgattcaccggacgttcacagtgacggaaaatggctttccttcatcatcaggcagctgttaagcaatgccgtcaaatacagtgaggcggatgacattaccgtaaaaagctatgaacaaaacggccaggtgcatgtgaatattgaagaccgcggcatcggcatcgagcccaaagatcttccgcgcatttttgaaaagggatttacctcgacgcgaatgaggcgggatcacgcgtcaacggggatgggcctgtatttggctcaaaaagctgcggctcctcttctcatccggatcagcgtgcgctctgagccggaaagcggcacggtttttaccttggtgtttccgaaacagaacgatgccgtcagcatgttcagcatgtgacaaaagtgtcacatgcttttctcttttgttcgcttaatcaaacgaaaaaaacggcttctgtttttaaaataaagataaccaatgtaaaaggagaattataacgcgatgattttagaagcaggcaatatccaaaaaagctacggaaacaagctgaataaacaagaggtgctgaaaggaattgatcttcagattcacaaaggggaattcgtcagcattatgggcccgtcgggatcagggaaaacgacccttttgaatgtgctttcctccattgataaagtgagcgcggggaccattaaactgaatgagacggagattacatccatgaaagaaaaacagcttgccgaattcagaaaacggcatctcggctttatttttcaggattataatttattggacacgctgaccgtgaaggaaaacatactcctgccgttatccattacgaaaatgtctaagaaagaggcggacctgcgatttgccgagacggcagaggagcttgggatctatgatttgcgacataagtatccgagtgaaatttccggcgggcaaaaacagcggacgtctgccgcaagagctgttattcacgaaccgggcattatttttgctgatgagccgaccggagcgctcgattcaaaggctgccatggatttactgaataaactcagccgtctgaatcaaaaacgccgcgccaccattgtgatggtgacgcatgatccggttgccgccagctattccggacgtgtggttttcattaaagacggccgtgtgtatacacagctgaataaaggcggccaggacagaccggacttttttcaggatattatgaaaacgcaaagtgtattgggcggggttcaggcatgagtattcatcatttgatcttccagaacctgaaaaagaatatgaaaaactattacctttacgtttttgcgctggtgttcagcgcagccctttatttcgcatttgttacgatgcaatacgatccggcgcttgatgaaatgaaaagctccataaaaggagcggcggcaatccgggccgcctctgtactgcttgtggcgatcgtgtcggtatttcttttatacgctaacaccatttttattaaacggcgcggccgggaaatcggcttattccgattaatcggcatgacgaaaatgcacattttccgcatactcagcacagaaaatttcattttgtatttcggatcgatttggatcggtatttttgccggcttttctctttcgaaattatgtatgatgatgctgtttcatacagtcggtgtgaaagcctctgtctcactgtttttttcaagcaaggcgctcgttcagacgttaattgtgttcggggcaatttacctgctgattatggtgatgaattacttatttattaaacggcaaagcattttgtctttatttaaaaccgcgtcatcgtcagaaagcggcataagacggctttcttgggtgcagatgtcgatcggcgttgtcggtattgcggccattatcgccggctatgccgtgtccgcggatttattcggaggcagttttacgagcatgaatgaactgttttcggccatggtgtttattctcggctcggtcattatcggaacttatctgttttataaaggttcggtcagctttctggcaaatctcatccgaaaatcaaaaggcgggtatctgaatgtcagtgaagtgctgtctttgtcatccatcatgttccggatgaagtcaaacgccgtgctgctgacgattattacgactctttcggcgctggcaatcggtttgctgtctttaagctatatttcgtactattccgcggaaaaatcggctgagcaaaatactgccgcggactttgcgtttgataaccaaaaggagactgactcatttaccgctttattgaagaaaaacggaattgaacacaaagtgaaaacaatcaagaccattcaagccggtgtcaatatgaagaacatcataaacggcgatatgaaaagctttcaacaagacccgtccagcttggcgctgccgattataagcgagaaagacgcagaagggacggagctttctgacggagaagccgtgtttaccggatataatgatatgatgaaaagatttctcgacctgaaaacgtcaggttccattgatataaacggcaaaacggataaaataccgctggcgtataagggcttgaagaacgacttcctcctgtcatatacatttacaagcggagggctgccgaccgttatcgtcacgcagcaggtatttgatcggatcgagaaagatatcgacccgtccatccagggaaaatcaaatcggtttttcggcattacactcaaacgtgaagaggacatccaaaaagctgatggtctgtttcaggcgcagcactattcagatggcgcgctttcacaatttgaaacggctgacacccaaaagaaaaacatggggctgatcatgtttattgtcggctttttgggattgacctttctgatcacctcaggctgtatcctttattttaaacaaatgggcgagtgtgaggatgagaaggctgattacacgatattgcggaagctcggcttcacaacgggagatctgctgaaaggcatccgccggaagcaggcgtatcatttcgggattccgctcgttctagggctgttccacagctattttgccgttcagtcaggatggtttttattcggaacggaagtgtggacgccgatgatcatcgtcatggcgctgtatacgctgctgtactccatcttcggcatgctgtcggtgctatactataaaaaggtcattcaatccgccttgtaaaacaagttgaggagcctccgcataagcggaggctttttttgtatgaatagaagaaagcgatttttaaaagaatagacatacgtcattttttcgcgcgggggagccttatgcagaagtattttcaattgaaatctgaaacaggggcctttcatcttttttccaaggaacacattttcacgctgttgatcatcggattgctgggggcgggcgtgatcatgttccggaaaaagctcaaccagagccggccgaatcgcatgatccgctatgtgctgttcattcttctagccgtgtcgcagatcagctatcatatatggctgctttgtcatcatgcctggtcgctgaaaacagctctgccgctgcagctgagcgacctttccgtctatttggcgatgctgatggtcatgacaaaaagcaaaaaactgttcgccttcctctattttgccggtttgggcagcgccatacaggcgatggcaacacctgatttaggggcgtattctttccctcattttcggtacatcgtgtttttcgtctcccacggctgtgtttttcttacctgtctattcatggctgcttcagaaaggtacaggccgtcggcgcgcgggctgtgggtatcggtgctgatcgtaaatctgtacggggcgtgtgtcttttttattgatcgtgtgctgaatgcaaattacctatatttaatgaaaaaaccgaagaccgcttcgcttctgaacgtattcggaccttggccgtggtatcttctatcaatggaagcggcggtgatattgagctttttcattctgtatattccgttttggctgctgaggaaaagagcgtgaggccggcctgtttttgcgaatccaatcatttgtaattttttcaacattccggcattatttttttcagattctgatgttgaaaaaagacgtccgcggcgatagaatgaatgtgctatgataacgtgttcgatacggagccgcggcttgcggtttccgttttttcatggggttttttatagagagaggggggatcggtatgccgcgcgctttgaagatattaatcatcggaatgtttatcaatgtgacgggcgcatcttttttgtggccgctgaatacgatctatattcataatcatttagggaaatcgctgactgttgcggggatagttctgatgctgaattccggtgccagtgtggcggggaatttatgcggcggatttttgtttgataaaatcggcggattcaaatccattatgctgggcattatgatcacattagctagtcttctcggactcgttctgtttcaccaatggcctgtttatatttggctgctcaccgttgtcggcttcggttccggtatcgtgtttccggccagttatgccatggcgggagcggtatggaaagaaggcgggcggagagcttttaatgcgatctatgtagctcagaacgcaggtgtcgccgtgggctcggcactcggcgggatggttgcggcgtactcgtttacgtacgtgtttttagccaatgctttgctgtatgtgttgtttttccttatcgtatttttcgggtttcgaaatatcaaaaccggaaatgcgagccaggtttctgtcctggactacgagcctgtcagcagcagaacgaaatttacggcgcttctcatattgagcggcgggtatgttctcgggtggattgcctattcgcagtggtccacaaccgttgcgtcacatactcaaagcatcggtatgccgctttcattatacagtgtgctctggaccgtaaacggaatattaattgtcgccggacagcctctcataggagctgttctgaaaaaatggtccggtgcgttaaaaacgcagatggtcatcggcttttgtatttttatcgtctcgttcggcgtgcttctcagcgccaagcaatttccgatgtacctcaccgcaatggtgattttaaccgtcggagaaatgcttgtctggcctgccgtgcctaccattgccaatcagcttgcgcctaaggggaaagaaggtttttaccaaggattcgtcaacagtgcggcgacgggcggcagaatgatcgggccgctccttggcggcgtgctggttgatcagtacggcatgagcgtgctgctgttgatcctgatggtgcttcttgttgtcagcatcgcagcgacggtgctgtacgacaaacgcctgaaaaccgttaataaacaaaacgtccaagtgcgatgacgacataaaagaatcccgctgtttcggcgggatttttttgtttatacgaccggaagcacattgaccgcgtccttaacgtttaaatatgtctttaatgaagaaaagctggcatcaagctgattcattctcatggcgagggaaggcttgatcccggtgataatcaattccgtgccgattaatttaagcagatggtgcaatttaaaaatccggtctgcggtctgttcgtttacctcggccagacctgataagtctataattaagtaatcatctttagatgcggttaatatgtccgtcaaagttgtcacgattgaatcaaatcgttcttccgttaagtttcccactaacggcaaagcggaaatgccgtttcggatcggaacaatcggcgttgacagtgtcgtgatttctgcgagggagtcctcaaggagcttttcgtattctttctgctctgtaatgtctttttgaaaaccgacaaaatagagcttgtcttcaacatacagaggatcaatgttgagttcattccaaaatggggtgccgtcttttttgacgtttttcagccgcaccgtgatcttttctttctggtttaagctctttcttattttcgcgacttgttgacggtcggtttctttgctttgcagaaatctgcagttcttacctaatatctcttcggaagagtagcctgtcatatccataaatccctgatttgtatatatgatgggattgtcctcaagagaggggtctgtaatcaccacgccgatgcgtgcgtgatcaagcgcctttttgataagctccagctgctccagttttccgaatacatttgagtcagccatgtaaaacccccttttggccgtaaagctgtgcgctttttcagccgttgtttctcccctttttaaatgaatctacagtaaccgtagcataacatatgttctgattcaagcagccgaagtttgcaatttgtcattcgggcttgtcctcatatacactgaatatataaggggaaggcacatcatcgctaagtaagtgactaggtcattgtcactgggtgaaaaatgaatctaatgcatcaagcttaccgatcatgtgttcacatataatggaagaaacaagctttttactttcctgctcaatcgccggtatgtagatatcgaatatcatcgtattcgtaagggggctggatggcctgaagtcgctttactaaataagggctttaggaaggtgatgaagatgctgcatcaggtaataattgcttgtgtaattggaggcatcatgggggttctcggtcatgtgaaaaagagaggcaggctggagaaacccagaatgacaaagcggtttatctatctcggttttttggaagatggttttatcggaatggctgcttccatcttacttgtcttatccgctgaccccgattcaggaattcaactcgtcatcttatccataatcgcaggctacggcggagaagctgttctcaggagctttgattttgtcagagaacaaaacagtgattcggccgaagcaaaaccacaccagcaaaaaaatcctccatcaaaataatatccccgctcatgacccgttctgggtacattcccattgtatacaaacctgcttgcacttatgaacagaattctataaaatacaggtaagattacggtagcgataagaacagtgaagaggagcagtaagaagcagattttgcaatcagagagttgacggccggtgcaagtcaatcaagtctgtttccgaactcgcctcagagttgcagcggcaaaaccgctgacgcataactgcgttaaaagtatcaagtgagtgcggcttaaaaccgcgctaacgagggtggtaccgcgggaaataaaaatctctcgtccctttttgggatgagggagttttttttagttttagaataatctgaatataatctttctcatcccgtcaatacttggactacatacgccgtattcaatcagaaggaggtttttacgttgagttttcagcacgaaaaaatagaaaagaaatggcagaattactggttggatcataaaacgttcgccgtcagtgaagagaatgacaagccgaagttttacgcgcttgacatgttcccgtatccttcaggagccggccttcatgtcggacatccggaaggctatacggcaaccgatatcctttcgcgcatgagacgcatgcaagggtacaacgtgcttcatccgatgggatgggacgcattcgggcttcctgccgagcaatacgcgcttgacacggggaatgatccggctgagttcacaaaacaaaatatagataatttccgccgccagatccaatcactcggattttcttacgattgggatcgtgaaatcaatacgactgatccggactattacaagtggacgcagtggatcttcaccaagctgtacgaaaaagggctcgcttacgtagacgaagtgccggtcaactggtgcccggcgctcggaacggtgcttgcgaacgaagaggtcattgacggcaaaagcgagcggggcggccatccggttgaacgccgtccgatgagacaatggatgctgaaaatcaccgcttatgcggacaggcttcttgaagatttagaagaacttgactggccggaaagcattaaagacatgcagcgcaactggatcggacgctcagaaggcgcaaacgtgcatttcgcgatcgacggcactgatgacacgtttacggtgtttacgacaagaccagacacgctgttcggcgcggcttatgccgtactggctcctgagcatgagcttgtggaggccatcacgacacctgaacaaaaagaagcggtagacgcttatgttaaagaagttcaggcgaaaagtgacctggaacggacggatcttgcgaaaacaaaaacgggcgtcttcacaggcgcatatgccgtaaaccctgcaaacggggaaaagctgccgatctggatagcggattatgtcctcgcctcttacggaacgggcgctgtaatggccgtgccggcgcatgatgaacgtgattttgaattcgccaaagtgttcagcctgcctgtcaaagaagtcgtaaaaggcggaaacacggaagaagaagcgtacacgggagacggagagcatgtcaattccggctttctgaacggactgaataaagcggaagcgattgaaaaaatgatcgcctggcttgaagaaacgaaaaacggtgagaaaaaagtgacataccgtctgcgtgattggctgttcagccgccagcgctattggggcgagccgattccggttattcattgggaagacggcacgtcaacagccgttccggcggaagagctgccgctgattctgccgaaaaccgatgaaatcaaaccgagcggaacaggtgaatcaccgcttgccaacattaaagagtgggtggaagtcactgatcctgaaacgggcaaaaaaggcagaagagaaacgaacacgatgccgcaatgggcgggaagctgctggtatttcctccgctttatcgacccgaaaaatccggatcagctcgcttcacctgagaaactggataaatggctgcccgttgatatttacatcggaggagcggagcatgccgtgcttcaccttctgtacgcgcgtttctggcataaattcctctacgatatcggtgtcgtgccgacgaaagaaccgttccaaaagctgtataaccaaggaatgattctcggggaaaacaatgaaaaaatgagtaaatcccgcggaaacgtcgtcaatccggatgaaattgtggcgtctcacggagcagatacgctccgcctgtacgaaatgtttatggggccgcttgatgcatctatcgcctggtctgaatcaggccttgacggagcgcgccgcttccttgaccgcgtatggcgtttgtttatcgaggaaaacggcgagctgacgggcaaagtgacagaaggcgcaggcgaaactcttgagcgcgtctatcatgaaacggtcatgaaagtgacagaaaacttcgaagcccttcgttttaacacgggcatttctcagctgatggtcttcattaatgaagcttacaaagcgaatgaactgccgaaagaatatatcgaaggttttgtgaagctgctttctcctattgcgccgcatttggctgaagaactgtgggaaaaactcggccacgaaggttcgattgcatacgaggcttggcctgcttatgacgaatcaaaactggtggatgatgaagttgaaatcgtcgtccagctgaacggaaaagtaaaagcgaaattaatggttccggctgatgctgataaagcagcgttagaacagctcgcacaagctgacgaaaaagtaaaagagcagcttgaaggaaaaacgatccggaaaatcattgccgtaccgggcaagcttgtcaatatcgtggcaaactgaccggacgaagcccctctcctacagagaggggcttttttatcaggcctctatcatagaaattgcaccgcgggctttggtatacttaacaccataaagatgaatgggagtgtcatacattgaaaataaatgaaatcagcacagccgcactggaagaaaaattaaaagcgggagaagagctgtatctgattgatgtcagagaagacgaagaagttgccgaaggaatgattccggaggccgttcacatccgcatgggggacatccctgagaagatggatgcgttagacaaggacaaggagtatgtatttatctgccgctccggaaaaagaagcatgaacgtttgtatgtatttacatgagcagggcttccgtacggttaatgttgaaggcggcatgctggagtgggaaggcgaaacaaagccgaagaaataacgctttgaagtgaaagaagaaaagggacgtgcgtctttttcttctttttttatagaaaaacgggaggcgaatcaggtgaaaccgatgatccgcgcgatgaaaacaaacgatataaaaacaggtccggcaagtcgcagaacgcagctggcatcatacgtatgaagggattattcccagacacattcaggatcagtttctcgaatcggcctatcaggatgagataatggaacgccggctcttgcattctctgttctttgtggcagaagaagaggggcgagtgctcggttttgcaaatgccaccccggttcaaaaagacggaaatgcggagctgaccgccatctatattgacccggattgccagggaagcgggataggcacggcactccttaaagaatgcatcaggcagtccggcggggtaaaaaagctttatgtccatgcagaaaaagaaaaccgcattgccttgtccttttatcaagcgaaagggtttcaatgggtatgtgaatttgaagaagattttaaaggacacactttacagacggtcaaactggtactgaacatataaaagcgtccggcctgcccaggaccggatcgcgaatgatcagtgataagccggaagccagtctttgtgcgcttcaaataagtcattgcacaaagatatgatgtcattcatggaaagctcggcgcttgtatgcgggtcaagcatggccgcctgatatacggcttccttttttaatgtaacggccgcttcgatggttaaaagctgtgtgttaatgtttgttctgttgagcgccgcgagctgctccggaagttcgcccgaatagcacggcataatgtggtttttgacagctgtgcaaggcacttcaacgaccgctttcgccggcaggttcggtatcagcccggtattcagcacattgccgctgaatatgaacggacggcccgtctccatcgcttctataattctcgaaccgtattcttttgagcgttcgtgcgtcaggttttgattgttgatgatgccgtctctcatcgtttcccaattgttgatttgttccgcgcatctcctcggatattcatcaagcggaatttggagttcatctatcagctcaggataccggctttttataaaatacgggtgatattcagcattatgctcagatgattccgttacgtagcagccgaatttatccatcagctcaaaccgcaccatgtccttatgtttcgtcttttgcttttcgcgtgcccgtcttttaatttcaggatataaatcaattccgtcttttttaatctccaaaagccaagccatatggttgatgccggcaatgcgttcttccgtaccttcgtgatccatgccgagtgagtcaaacagatctttggtacatacctggacgctgtggcacaggccgaccgttttgacatttgtatgtctgagcatcgctccggtcagagaggccatcggatttgtatagtttaacagccacgcatccgggcagacctcttccatgtcttttgcgatgtcaaataaaacggggatggtgcgaagggaacggaaaatgccgcctattccgacggtatcggcaatcgtctggcggagaccgtaccgcttcgggatgtcaaagtcaatgaccgtcgcgggtttatagcctccgacctgaatggcgtttatcacatagccggcgtgtttcagcgcctgttttcggtcatcgtaggagatgatggatatactcgtattgtagcggtctctcatgttttccagcatgagctgggattctttcagccgtacagcgtcaatatcataaagcgcgaattcaaacccgtttaatgcttcagtcagtaagcagtcccccagtacattttttgcgaaaatcgtgctccccgctccgataaacgtaattttcttcaacagaaattcctcccttttcttctcagcctttgaccgccccggaggacagccctgagataaaatatttttgaagcgtcaaaaacaatacgaccatcggcagcatcgccataattgcggctgcggcgactaagtgaagattgttcgcattttcgccgaagaatcccgccatggccacggtcaatgtctgcaccttttgatcttgtaaaaagaaaatcgcaaattggtaatcgttccagataaacacgcaggaaataatgcagaccgttgcggtaatcggtttcaacaaaggaaacacgattgtataaaaagtcctgatcaatcccgcgccgtccatcctggcggcttcctcaagctctttcggaatggaagagcggataaaccctgaatataagaaaacggtcagcggcatatatgcagcagtattaatgagaatggctgcggcatgcgtattgatcagccccgcatcagcgaccatcttgtataaaggaaccatggaagtcaaaggcgggatgatcatgattgaaatcaaaaggccgaagacgattttgttcagctttgtatttcttcttgcgagagggtatgcggcaagcgaacccatgaaaattaataaagcggcggaaacggctgtaatgatgatcgtgttcagaaaggattgcccgagagaggcacgttcccatgcttcacgaaaattctgaaatgaaaaggcggatggcagcgaccattttgaactgtagtcaccttttgcttttaatgacgtggtcagcaaaatataaaaggggacaatatgaacgcaagagataacggctgccaacagcgtaaaaatccgcattcgggctgttttcatgacatttccgtctcctttcgcttgaaatacacgagagccgaaaagctgatgacaagaataatgacggacataaacacgccttgggcggcggcatatcccgcatcctgccgtttaaaatataaatcatacataaacgtcgacatcgattgagaggaattgcccggcccgcctgcggtcagcgcgaaaatgacatcaaacagcttcagcccgccgatgatattgatgaccatgttgatggtgacagccggcatcaataaaggcagggtgatggtgaaaaacggctgaagacctcccgcgccatctatttttgcggcctcgtaataatctttcggaatgctttgcagccccgccaaatatacaatcatcgcaatgcctgcgtattgatacgtgttaatcatcacgataatccacgggtttgccgcagggcttgccaaggcgttgacaggaccgattcccagtgcaccaagtacatcattcagcgcacccccgtcatatgagaaaataaaataccaaatgtatcccattatcagcggactgataatgacgggcaggtagacgatcgttcttgtgagcgccttcatttttaagctctgattcaaaagcagcgcatataaaagtccgagcatattctgaaaaaaagtgcttccgattccgtaaagcaaagtatttttcacaacaagccacgtgtccggatctgttaaaagccttttatattgagtgactcccacccattgatacgtctgtgagaagccgttccagtttgtaaatgtgataaaagcgcctttgacaaacggaaaaatcatgaaaataaataccgtggcaagagcgggaacgtacatccaccatagtgacgcggattttaccggcttttgatgttgaaatccttgggtttctcttgcaagatcactcattctttttcagctccctgtgaatcagattgaagccggagccgcttatattccctgccgagtttcgctgaaatttcagcgggggttaagatatcggccatcagctcctgcccggctgttcccatcacatcccacattccgttcggcaaataaaggcggtcaaaataaggctgcaccttaatatgctgatagcgcttatagtcatttgcgtagaaaatgtccgtttgcacattcactaatccggctggaagcgaggtcgcttcggcaattgattttgcatgctcgggtcgggccataaatgcgataaactgtttcgcttctttaagccgcggggaatccttgaatgccgccagcgtgtaacgttcgcctccgatccaaaccggcgcgtctcccttgtggacggccggggtcggtatgatgccgacttttaccttcggattgatttgagcgacatcttggccgagggtgccgccctgcagcgtaaaggcgattttgttttgcgccatcagttcaatgagctgggaccgttttgccgtcacggcatctatattgagcaggttttccttttgcatctctttcagtttgtcagataaataggtgaagtgtgtccagcggaaggttccgtttaacagttgttttttgtaacggtgtgcgggatctgtgatgagaagcggtgcggcgaattgatcgtaatattgggcaaatgagcttttctcatagccggcaaaccagaagggggtgactgttccgccgcttttttctttaatctgtctcaatgccttcataaaatcatccattgtttccggtggttttattctgtatttttccaacagcgtgcggttgtaggccagtccgtcctttgcctgattcagagggaaggcgtatattctgcctttggcgtctttgagcatgctgtttaaattcggatcgagccgcttcgtccaagacatgccgctgaggtcggcggtatattctccgtagcggattttggcccagccgtgtgtgtcgaaaagatcgggcatgtcaccggctgccattctgaccctcatcatattttcgtagtcattgcctgggaaatgaacgtttacttgaatgtccggatgttctttttggaatgaatcagccaactttctgaatacggcgcgttcgctgtctgaggatatggtggaatagactgtcaatgttttctgcttttctccggcgccgctctgttctgccgagcagccgggaaggatcatgcaagtaaaagaaagaaacaaagccagtaagcgtttcatcttttcctcctttaaatatgatataaacgctgcgggacacgtcacctcctttcttgtgagccgcagctttgtctgacaatcaatgaagtggggagcgtcacggccagcgggacggttctgccgtttaaacggtcgagaagcaatttgacacccgtccggcccatctcttccgtgtatacttttaccgttgataacggcgtgctggcgtattctgcctcatcaattccgttgaagctgacaaccgccgtatcgcgcgggacttgaagaccggcttcctgcaaggcttttaaagcgccgacagccatcgaatcacttgcgataaaaaaggcatcggggagacttccgcctttgatggcttcattcatcagccggaacccttcgtgcatactgtattcgccgatcagcacatgctccggctcggcgccggccatttgtaagaaagcggtcagacgcttatcctcaatcgtattattgctgtttacaccgtctatgacggtatgctcccgctcccggccgccgatataaccgagccgctggtaaccgagcgacagaagatgttctatcgccttttgcgctgcggcataaaaatccacgctgacggaatcgtagcgggcgggatcgggggtgccgttaacaaataccgcgtgcctgaaagcggcgctgatgttcgtaagcgcctcgtcttgcaggctgccgattacgatcacgccgtccagttcgtgaaacatatgctcttgaaaagaaccgagatggatagaagatgtgataaaaactttttgccgaaagcattcttcctcaatgccttttcggatcgctgaaaaataagggtcctgccgttcttcttcgggtgacaggcagctgacaacgccgatcaggggcgctgaatcgctgcggctgcggttcttccgtttttttgccgacggctgatagcccagctcatcggcgatcctcagaactttttctcttgtttcatcagtcacggctaaagagtcatccttattcaaaattctcgatactgtcgcgctggatacagatgcctgtaaggcaatatctttgagacggaccatttcgcatctcctttttactaaatattcactaaatagaaatgacctggttattgttaaagtgatattatcatacgttagtaagcgttttcaacaactatttttggtcacttttagtaaaaaatcagtaaaaaagaaaatctgtttttctctatcatatttcaattgaaccggaataaattgatagagaaaggagagggtgatgtgctgaagatagctgtttttgatgaggagcatgaaaaggatctgcagactgaagtcaatacatttttaaaggggatttctgatgaacagctcgttgatattaaatatacggtagcggcggcctgtgatcctgaaggtgagcagctttattgtttttccgctctcattttataccgaaaataaaaaagcccggacgaaatgccgggcttctttgtgcattatgcttttttgacgcggggacttcttggtttttggtatttctccgcttgtttgattccttttctctcgctcgctaatgacttgtacagagacacgatcatcagaaggatcacgactgaaaacggaaccgcggcgagaatggccgtgttttgcagtgcggcaagaccgccggaatataataaaaccgctgctacggcggactggatgacgccccagatgattttcacccggtttgacgggtctaatgagccgtaagacgtttgcattccaagcacaaatgttgctgaatccgctgatgtaataaagaatacagcgatcagaacaagcgttaatacggatgtcaccattgtcagcggatagtggctgagtgtgccgaacagcatcgtatccgttgacattcccgcgacattgaatacgcctttctgctgaagatccatcgcggatacaccgaagatcgcaaaccataagaaagccaatatacaaggtgtcaccaacaccccgattaaaaattcccggatcgtccggccccttgatacacgggcgataaaaatgccgacaaacggcgaccaggatatccaccaggcccaatagaaaatggtccagctgttaatccattcgcgtttttggggatcattcggagacaagcgaaagctcatctgcacgatattttggatgtattggccgatagaatcggtaaatgagttcataatcagcaccgtcgggcctgcaatgagcataaagatcattaaaatagccgcgagcgccatgttggtattgcttaagtatttaatccctttgccgattccgctccacgcagaaatcaaaaataacacggtcacgacagcgatcaggatcagctgaatggaaaatgttttcggaatgccgaataaataatgcagaccgccgttgatctgagtcgctccgagccctaagcttgtcgccacaccgacaacggtcgcaaacacggcgatacagtcaatcgctttgccgatcggcccgtttactttatcgcccaaaagcggtgtcagtgtgctgctgatcaaaccgggcgcgtcttttctgaattgaaaatatgcgatacataaagcgacaaccgcatagatggcccaagcgtgcagcccccagtggaaaaatgtgtaccggagcgcatcacgaaatgcttggggcgtttctgtttcacctgagggagagctgatggcgtaatggctgatcggttccgcagccccgtaaaataccaaaccgattcccatgcctgcgctgaaaagcatggcaaaccatgataataagccgaattccggtttttccccgggttttccgagttttattgtgccgatcggacttacaatgagaaagagacagaaaccgacaaatatagaaacgaccagcagataataccagccgaaagaatccgtaataaatttttgtgccgtatcagtgacttgctgcaggctgtcaggagaaatggccccccataaaaccgcagcggctgtgatgacaatcacaatccaaaaaacactggagatgttcttcttcaaacgttctcaccctctgactatttttttcaatacgccattttgttttagtatggtcgtacgattgcagatcaatcctttcttcctattccctcaatcaggtgaaacaaaacgcagaaaactctatcatgtttttggtcaattatcaacgggaacgctcaggtaaatgcgctttaaaccatttagagcgagcgtgagaaacgtcctgcattcaaaccggcgagacgcccagtgacaaaggctgaagtgatattgtagcccccggtatagccgtggatatcgagtatttctccgcaaaaatataagccttccattttttttgacgccatttgtttcggctcaatctcttttacggaaacacctccgcctgtgacaaacgctttgtccaaagaaagcgttccgtcagcggcaaccgtaaattgtttgcagtctttgacaaaagccctgaattgatccttcggcagttccgtaaagcttgtctgcggatcaagaccgttccgttccagaagaaaaagcagataccgttcctgcatccacggcttcagcgcgtttttgagcgcttttttcggtccgtctttcagttccttgtgcatcttttgaaataactcttcctcgttgatgcctggaaacagatcgatgcggagtttgacctctggctgctttttcagttctttgacgacaaactggctgcagcggagaatggcggggcctgacaagccgaaatgggtaaacagcatgtccatcacgtgtgtgacgattggtttgccttttttattcagaacgctgacggccgcgtttctaagggacagcccctgaagtgttttttgtttaataaacggttctgacgacgtaaccggcacttccgtcggaaagagttcggtcacggtatgaccggccgcttccgcccatgcatagccgtctccggtgctgccggtatgcgggactgattttccgccgaccgcgataatgacggcgtctgcgttaatgtgttcgtcattgtttgtcgtaatacccgctgtcctgccgttctcgtaccgcacttctttgattttttcatttgtgcggatggtgacattcagttgttttaatcggttcaaaagcgcatcgacaacgctttgcgctttgtccgtcaccgggaacatgcgcccgtggtcttcttctttcagctgaatgccgagtttttcaaaaaaggcgataatatcttcattattaaattcggaaaacgcgctgtataaaaagcggccgttgccggggatgtgtttgatgatttcttcaacggggaggcggttggtcacgttgcagcgcccgccgccggaaatcgccagcttccgtcccagcttgtttcctttatcgattaataatacgtccgccccttcttcgcctgcggcaatcgcagccattaaaccggacgggccgccgccgatcacaatcacgtcatagtgtttcatatttcatcaacaactttctttttcacgtataataggcggaaatgtccgctttctgctattatagcgaaagaaagggaatccttaaacgtattttgtttttaaagagttttcccaaaaagtttccctctgtaattattaccgtctaattgcccagttgtgttaaaatagaaaagttgaatcttcgtagaaaatggtgatgaggaaacatgtcaagcaaattgttaaggggcacgttcgtgctgacgctcggcacctatatatcgcggattttagggatgatttatctgatcccgttcggagcgatggtcggagcgacgggcggagctttgtttcaatacggatataatcaatatacactgtttttaaacattgccacgatgggatttcccgccgcggtttcaaaatttgtctcgaaatataattccaagggagactatgagacgagcaggcggatgctgagagcgggaatgtcggttatgctcgtaaccgggatgatcgctttttcaattctttatatttcagcgccgttttttgcggaaacatctctcggcggcacgagtaacaacggacttacgattgaccacgtcgtttatgtcatccggatggtcagtctggcacttttggtcgtgccgattatgagtcttgtgcgcggttttttccaaggtcatcagatgatggggccgacagccgtttcacaggttgtggagcagcttgcccggatcatctttttattgggcgcgacgtatttgattttaagagtgatcaacggcggccttgtcatcgcagtcggatacgcgactttcgcggcgctgatcggatcattcggagggcttgtcgtcctttatatttactggaataagcggaagggcgatctcctggcgatgaagccgaatctcgtcccgtctgcaaacttaagttataaaaaaatgttcattgagcttttcagttatgccgctccttacgtatttgtcggactggcgattcctttgtattcatatatcgatacgaatacgtttaataaagcgatgattgcggcgggccataaggatatcagccaggacatgcttgcgattgtcaccctttatgtgccgaagcttgtgatgatcccggtttctctggcgaccgctttcggtctgacgctgattccgacgattactgaatcgtttacgagcaggaattataagcttttgaaccagcagattaaccagacgatgcaaatcattctgtttttggttattcccgctgttgtcgggatgtccgtgttatcgggtccggcctatacgttcttctacggctctgaaagtcttcgcccggatatcggacaggatatattgttctggtacgcgcctgtcgcgattctgttttctctgtttaccgtaaacgccgcgatcctgcaagggattaataagcagaaatttgctgtcgtgagccttttcatcggcgtcattataaaagtggtgctgaacgtgccgctgatcaagctgtttcagggagacggtgccatcttggcaacggcgctcggttatatcgcttctcttctgtacggttttattatgattaagcgccatgcgggctattcgtatacggtacttataaaacgggttattttaatcgcggtcctgtccgtcgtgatgggagtcgcggtcaagctgactcaatggctgctcagcttctttgtaacataccaaagcggccaggtgcatgcggcgattgtcgtctttgtctgcgccgctgtcggcggtgcggtgtacatgtttgccgcgtaccgaatcggatttttacagaaaatgtttggaaaccgtctgccccgcgttttgaggagaggcaggcattccgcccattaagaataatgaatagtccgcttatcgcgggcttttctttttaaaggagaggatcaggatgagacttgataagctgcttgccaacagcggattcggctcaagaaaagatgtgaaaaaaatcgtcaaggctggggctgtcatgattgacggagagccggcgaaagatgtgaaaacccatgtcgatccggaaaaacaggacatcatggtatacggagagccggcagactatcgtgaatttatttatgtcatgatgaataagccgcaaggagtgctgtccgctaccgaagacagccgccagcaaacggtggttgatctgctgacgcctgaagaacagcgttttgaaccgtttccggcgggacgtcttgataaggatacggaaggctttttgcttctgaccaatgacgggcagctcgctcatcgcctgctttctccgaaaaagcatgtgcccaaaacatatgaggtccgattaatttcacctctgtcaccggaagacatcgttcatctggaaagaggcgtcgtcattgaaggaggctataagacgaagccggcagccgttgaaatcattacagaaagcccggatgaaacggtgattcacttgaccattacagaaggcaaatatcatcaggtgaagctgatggcaaaggctgtcggaaatgaagtggcttatttgaagcggctttcgatgggggctgtttctcttgacccggatcttaaaccgggagaattccgcgagctgactgaagaggagctcgaaacgctgagaggcgctgaagtgtaatcgatatcagaaaagcccaaaacagatttgttttgggctttttatatagaggaacaaaaaacaaggcaaagacgctgctttgccttgcagcatgtcaggccgaaaagggccttatgtaattgttcgcttaagatgtaattttcactttttttcgtgttgtctcccacttgcctcggctaggactatgaacaagatcattgtatgctaacacatttaagtctcgctgaatggttctaggtgtaatgccgaattcatcaaccagttcctgtgttgtcacaagacctttttcctggatgaacatgtaaactgatttaatccgagtcagcatacgatttgttgaaggtttcaaaaaaccactccctatcataagatcggatggacttgatataccacaactttcgactctaaaacttcgtacgaataagcaacaaaggatgacattctgttttttctcttttaactgcccccattatacacgatatggacaacatgaatctaggaataagcgcagataattttttccaaatgggtgccgccttggtgcattactatgcccggtccgcttttattattatggaaactgaaactttttttatacatgtccgtatgaaaacgggggagtgagaagtttgggagaattattgaatgcaaacattgtctgcgccggttatgctgacaggccgaaggtgatttccgatgtatctctgtcagtcaacgctggtgaaattgccggtttaatcggagcgaacggcgcggggaaaagcacagtgataaaggcggttctcgggctgtcccgggatatagaaggcggtattgagtggaatgattcatcttatgcttacataccggagcgtccgagcttttacgatgaactgacgctttgggagcacctcgagctgaccgggtcattgcggggtatagaaggggaagaatgccgtgagcgggccgagcggctgcttgaagagttttcgctgacgtctgtaaaacatgatgtgccttccggtttttcaaaagggatgcagcaaaaattgatgctcatacaggcatttttggcgaagccggatatttacatcattgatgagccttttatcggacttgatccgatctcaacgaagctgtttaccgacatgctgattgctgagaaagaaaggggcgcggggattttgatgtgcactcatgttctggatacggcggaaaaaatctgcgaccggttttatttgctggatcagggcgctctgcttcttcaaggcacgttagaggagcttcaggaaaaaacggggagccgttcactgctggattgcttttattcagcggttcggagcagtcagcgatgaccgggcgggctttgttttttcaaaggctgtttcattattggcggtatcaatggaaggtgtttcagacggtcattgattggacggtcgcgctgtatatcgttcttcccgctgccgcatttgccgtttatcaatatgctgattggctgaacggcagggggcttcttaatggagcggcaggagtattaggatggggctggctgtatgtattcagtgccctgctgttgtgcacgggttttattcatacctttttgctggaagcggatcacgtatttttggtgcatgcaaaacatctgatgcaaaagctgaaaaggtacgcgcttttgtattcgatgttcctttcccttatcaaatggggtgcgcttgccgtattgttatttcccttatggcgccagtacggtgactgtaccttaccggcatattcaggtatgttttgctgtctgttcggcttccataccgcgatattagccgtacatcggcacagaaaaaacagcaggcggacattcgggaatcaggcggctggctggctgaaagtgatggttctgatggcgggtgcgttttttatgatcgtctttgccgccgaatggtattggctttggccggcgggatgtatattgttcatctgttccgcccttttgacttggaaagggacggagacattatcagcctttgaggaagaagtgcttgaggagaacaggcgcaagctttctttcgcggcctttgttttgatgctcagccatgatgtgcagctcccgaatggtaaaaataaagggcggagcaagccgtttttatatcccggctcaaagcacatctttacaaaacggtcggcgtatacggcgtggaaagaattgttctttaaagtgctgatccgaaacggcgggtatctccggcagctttaccttttaaccgcggcttttacggctcttattctcgttcttccgctcttagtgaagccggcagtcctcattttatttgcgatcgtcagccgctatgccgcgtcgcttttatttgaccggatcacggacaaaccggttttaagcggtatcaagagagacagtgatgactatttcagggcgcgaaacagcgcattaaccgtcatccaagtcatctgttccgcctggtgtctcattgccgcgattctttccgttctttatatgtgaaaatccctttccaaaaggaaagggatttttcttaatgtccgttcaaaataaaaagctgaataaaaaacaatatggcgaagatgatgactaaaggatggatttcgcgccattttttcttagctgctttaacaagcggatatgaaatgaagccgagtgcgattccggttgaaatactggacgttaaaggcatcgccaaaatgacgagaaaggccgggaacgcttcatcaagctcattccagcggatattcgataccgcgcccatcatcaggctgccgacaataatcagagccggtgacgtaatcgcggacacttccgataagacgctgacaagcgggctgaaaaacatggaaacggcaaacataacggcaatcgtcagcgccgtcagacccgttcttccgccggccgccacacctgctgaagattcaacgaacgcggtcgtcgggctggtgccgaagatacttcccaccgtcgtagcggtcgaatcagccaaaagcgctcttctggcattcggcagctgattgtttttgatcaatcccgcttgttcggcgacaccgatcatggtgccggttgtgtcaaaaatcgtaacaagaagaaaagaaaacacaacggcgtacagaccgtgatgcacgacatccccgagggcaccgaacggatttgtgatcaaaagcccctccggcaggtgcgggaaggacataaatcctttcgcgaaatggatctgcccggtcaaaaaggcaatgacggcggtcagcgccattccgatgaacagagccccgtttacattcagcaccatcagtacaatactgatgataagtccgataagcgttaaaatgacggcgggcgaatgaagatcgccgagtgcgacaagattagatttatcagccgtgatgattccggattggcgtaagccgataaaagcgataaataagccgatgccggtcgtaattccgtattttaaattgtccggaatcgcttctataagttgttttcttaaaggcgttaacgataaaataataaagatgactcccgcgataaaaacggcgctgaaagccgtctgatacgtaatgccgctgcctgtgccgacaacgtgaaaggctagatacgcgtttaagcccatgccgggggcaatggcgatcggaaaattcgcagcgagagccatccataaagttccgacaatggaagcgataatcgtcgcggtgaacacctggtcaaacggaattcccgcattggaaaggatcaccggattgacgacaatgatatacaccattgtgaaaaaggtggtcaatcccgcggtaatttctctttttattgtcgtttgatgcttgtcgagatgaaacataagtacctccaatgacgaacattttttcaaaacatcatctatattattcgttttatcgacattttgcaagtctttatcaagaaaggggatttgtgatgaactgggaagttgaagtcatcagaaacaaagaagatctgatccgtgacacgcagaagtttttgcagatcaacagcgtaatggacgaatcaacagccggtcccggccggccgtttggagaaggcgtcaatgccagcctgacgtcactgctggaattcggtgaaaaagaaggcttcaccgtaaagaatcttgacggctatgcgggccatattgaatggggaacgggtgacgaaatcgtcggcgttttgtgccacgtcgatgtcgttccgcccggagacggctggacgagcgatccgttttcagccgatatcagggacggccggatatatgccagaggcgccatagatgataaagggccgacaatggcggcgttttatgcgctgaaaatcgtcaaagacatgcagcttcctttatccaaacgcgtgagaatcatcatcggaacggatgaagaaagtgattggagatgcgtggatcactacttcaaacacgaaaaaatgcctgacatcggctttgctcctgacgcggattttccgatcattaacgcggaaaaaggaattatagatgcgtcactgcgcattgcaaaaagcgcttctgacaaagacgcaaaaaacgggcttctgtcattccgttcgggactgcgcttgaacatggtgccggatgcggctgaagcggttattgaaggggacggtcttgatgccgtgcacgcatatttcagcaaatggcttgagcggtcaaaaacacaaggtgaagcagtttcggaaaatggaaaactgatgcttcgggtatacggaaaatcatgccacgcgatggaaccggataatggtgtcaatgccggcttaaagcttgctgaatgccttaacggaacggagctggatgaagccggaaagcactttgtcaaaaccgtcagtgactattttttaaatgatacacgaggcaaaaaactgaaaatcgattgcagggatgacatcagcggagagcttacattgaatgtcggcacctttacatacagaaagggtgaggaaggagaactcggcatcaacatccgttatcccgtcacttcagacagcaaagtcatccgtgatgcttttacgtctgctgaagaattccggcttgaagaatttaaagacagcaaaccgcaccacgtttctgccgatcatccgctcgtaaagacgcttcaaaaggtttacgagggacagacgggaaagaaagcggatctgatttcaatcggcggaggaacgtatgcgagatccctttcggcgggcgtcgcgttcgggccgctgttccccggccggcctgacagcgcgcatcaaaaggatgagtacattgaaatcgatgaccttctccggtcaaccgctttatatgccgaagccatttatgagcttgccaagtgataataaaaagggacgccgaaagcggcatccctttttatcattcaaatgaccataaatccgttgataaataacgttctcccgtatcggccgtcatacagatgacgatctgttcggaagggaggcgtttggcggtttcaatggcggcgaagcaggcggcgcctgaagacgggccgacgagtataccttcttcccgggccagacgacgtgttgtcgtataagcatcttcatcagatattttcatgatttcatcgtaaacgtcctgattcagtatgccgggaataaatccggggcttgtcccgacaagcttatgagcgccgggttttccgccagacaggacgggagatcccgcgggctcggcgacatgaacaatcatatccgggaaaagctccctcagcgtttctccggttccggtaatggttccgcccgttcccgccgttgccacaaaagcaccgagcggtctgttgagctgctgaacggcctgatagatttcaatggcggtcgtttttcggtgggcatctggattagcgccgttatcgaattgcattgggataaaacttcccggaatctgttcggcgagttctttcgcttttttgatgctgccgggcattctttccgcccctggtgttaacacaacctccgcgccgtacgctttcaggaggttgatgcgttctttcgtcatcgtgtcaggcatgacgaggattgccttgtagccgcgcgccgccgcgttcatcgccaggccgatgcctgtgttgccgcttgtcggttcgatgatgacagagccgggttttaaatgcccgctgttttccgcttcaatgatcatattgtaagccgctctgtctttgacactgccgctcgggttaaacgattctaattttaaatagacctgtgctgcatgttctggctgaaggcgattgagctttacgatcggtgtgccgccgatcagctccgccgtgctgtttacgattttcaaggccggctcattcctttctgtataaaacgttcggtacataatatcctatcataatgagcggacagggttctcctctccgcttatccgttttataataacaccataaccaaagagggggagatcctcgtatgagagcttcattgccgcattattttatcggcattccgattccggctgacattgctgaaccgatttgggaagcagccaaaaaggagccggcgttatcattcaaaaaatgggtgcacccgcatgactatcatattacactcatttttctcggagccgcggaagaagaacggcttgcgaaattatcgtctctgctcgcagatgctgcgtcggcagcgcagccgtttaccgtacagtttcagcatctggatattttcggcgaccgcagacagccgagagtgcttcaccttgagcccgaacggaatgaactgctctttgatttgcgggaaaaaacaaaacaggctgttttgaaagccggttttcaagtggaaaaacggccttatcaccctcatatgacgatggcgcggaagtgggcgggagatcggccgtttcctgacgatgtgccgtttgaaagcggaagggtgcaaagtgccgtcagccggttttccctgtttcagacccatcttgaccggtcgcctaaatacgaagaaatcgcacagtttcaattggcataaacaaatattcggagtggagaaatcacatggcacagatcatcaaaattcacgactgcatatccagatatgaacttgatccatatcattatatgaaccagtttatccggctgaagaaagaacgctgggaggcgcttcttgaagcgtttgaccggaagacggaagaaaaagaaacggaaacggctgcaggcggggaaaccgatcaagcgccggccaggaaaaaattttccttgaaaaagagaaaagaagaaaatacggccgatataaatgaaaagaggcaccaatggtttgatgagccggagggagaagaggcgctgttcgggaatcttccgtctcgaaagtctgagctcgcgccttttttcaaagatcagctgtatgactttcaattaaaatgggcgagctccacgctttctcaaaagtctgagctttcgcaggcggtcaaaagggacaggatgttaaaaatgctggctcaaaagctgcccgattcctattttgtgatgtatcatccggttctgcaaattcagcaggcgtccgtcgaactgagcatgatcatcatctcgccgctggagattttctgcgccgcttttatggaagcggaagaggacagcgtatatatcggatcaaaacaccgtttttgggaagaaaggggctccggcagcacgcgtcaagtattgaatccgtctctcagcctgcaccggacaggctcggtcgtttcgcaaatcgtaaaagaaaagcaggccgacattcccgtgcggaagcttttgctcagcagaacgtcttatattgattacccggagccgccgtacgggctggaaatagctgataaacggactgccgcagagtggctggaaaagcagcagaaaaatacggcgccgatcaagcaccaccagctcaaggcggcgaaggctcttttgtcttacggcttaagcgattcaagccggagacaggaatggcttgattaaaacggacgtttgccggctgtctcttcatctatgaagcaggtgaaaacaaacgatgagtcaatggttttttattattaatccggtctcaggaggcgggcggggccggcgtgtctggaaatcagttcaaaaagagctgaccaggcgcggggtcagccaccgctcttttttgaccgggcatcccggacatgcggaggtgctggcgagacagatttcaatgatgcaggatcataagcttaagcggctgttcgtcatcggcggtgacgggacgatgcatgaagtcattaacggactgaaaggcacggatcagattgagctgacctttgtgcctgccggttcgtacaatgacttttccaaagggctcggtattaagaagtcggcgcttctccaagaaatcaaaagtctgcaccgcccgctcacacggaaattttttgcgggaagcatcaacttttttcatgacaaagcgcaatcactttattttattaaccacctgtctgtcggcttcgatgcctcagttttgaaggcagccgcgaattttccgttttcgcgcgttcttcggtttttgcgtctcggctttgtgatttacccgctcgcgcatttacatacggcctcggggtttcagccgttcagatttgtttgcacggcagacggccagaggcgtgaattccgcaatgtctggtttgtcattgcggctaatcacccttattacggaggcggcatgaaagcggcgccttcagcaaatccccgtcaaaaccattttgatattgtcatcgcagaaaacctgtcctttttctcgctgtatcgttttttatgggcgatgagcttcggccggcatatcaaaatggacggagtgacgatgataaaggggaaggaattcgtttttgaaacagatgggaaaattccgtttcacgctgacggcgagctgatcggaacgacgccgtttcggcttatgccgggcggtacgccgttgaaaataaaaacataataaacaaatgaaacccgtcaaatgtttcacggcaaagagcggttccggcataaatcttcagaattcacaggtgttcttgctagttttgcttgacgaagtttgtgctgtagcgctaaaatttataggacggctattgattagcatatgagactctcaatagctgtcttttttattctcatgaaattgtttatgacaggacgctccgccaatagagaaaggctggaggcctattctaaaatattttaagaaatgatgggttgaacattgatatgaactggttgggacaattactaggtagcgattgggagatcttccccgccggaggagctacaggagatgcatattatgcgaaacataacggccaacagctttttttaaaacgtaatagctcgccctttttagccgtgttatccgccgaaggcattgttccgaagctggtttggacgaaacggatggaaaacggagacgtcattacggctcagcattggatggcgggcagggagctgaaggcaaaggatatgagcggacgcccggtggctgagctgctccgcaaaatccacacatcaaaagctttgctcgacatgctgaaaagattgggaaaagaaccgcttgatccgggcgcccttttgtcgcagctgaagcaggccgtctttgccgtgcggcaattttcgccgcttattcaggaaggccttgcttatttggaagctcatgtggatcaggtgcaattcggtgaaaaagtcgtttgccattgtgatgtgaatcataataactggcttctgtctgaagacaaccagctgtatttaatagattgggacggcgccatgatagccgatccggccatggatctcggccctttattgtatcattacgtcgaagagccagcgtgggacagctggcttgggatgtacggcatgaagctcacggaagggcttcggctgcggatggcgtggtacatgttatcggagaccatcaccttcatcgcctggcacaaatcaaaaggaaacgacaaagcgtatcatgatgccatggaagagcttcatgccctgatgaagcggattgtcaagtagtcaggagtacgaatccatctgctccacccattgggacaaatggttttggtgctcctgaatatgcgtgtcgatggaatcggccgtgatgccggactggctgtagcggtagacatcctcgagcacgttttttatatttgaatcaagcccggtgttggccatcagtgatttgatgacgcgctccagctgttcatactcggcaaccgtgccgcagcaatccaattgatggtcggccagtatgtcctttaataaccggacctgatgttcgcttgttaagcccatgattcatatacacatcctttctgtgtcatacattgtgcaaagcggtgcggttttatgcatcacatgagtgttccggaccggggagcctctttttttatgcggccggcgcctttaaaaggcgcttgcggctctttatgtttcatggtatgttgttactcgaaattatagatagaggtgtcaatcatatgagaatgcgccataaaccttgggcgaatgattttctggcagaaaacgctgacatcgccatcagtgatccggcccagtataaagggcgatggaacacggtctttggcaatgacaacccgattcacattgaagtcggtacgggaaaagggcagttcatttcaggaatggccaagcagaatccggatatcaactatatcggcattgagctgtttaaaagcgtcatcgtcactgccgtccaaaaagtaaaggacagcggggctcacaatgtccgtttgttaaatatagacgcggaaacactgaatgacgtatttgaacggggagaaatcaagcgcgtatatttaaacttttctgacccgtggccgaaaaaccgtcacgaaaagcgccgtttaacatttaaaacgttcttgaaaaaatacgaagaagtgatgggcgaaacaggtgagattcattttaaaaccgataaccgcggtttattcgaatactctctgaaaagcttttccgaatacggcctgcttctgacggaagtcagccttgatctgcacaacagcgatccgaagggcaatattatgacagaatacgaagaaaaattctccgcgctcggccagccgatttaccgggccgaagttgaatggagaacaaaagacagactctgatgcgggagtctgtttttttatgccgccttttgctaccattacatcaggagggatcaagatggagacattgaatattgggaatatttcattaacatggctggacggcggtgtaacgcatatggacggaggagcgatgttcggcgttgtcccgaagcctttatggtcgagaaaataccccgtaaatgacaaaaaccagattgaattaagaacagacccgattctgatcagaaaaaacggcctgaatatattggttgacgcgggtatcggcagagggaaattctctgataaacaaaaaaggaattacggcgtaacacaggaatccaatctgaaacaatctcttcgtgaactcgggctttcctgtgaggacattcatattgccgcgatgacccatcttcattttgaccatgcatgcggcctgacggaatacagcggagaggagcttgtctctgttttcccgaatgcccgcattatcacttctgcgacagagtggcgcgaaatgagaaaccctaatatcagatcgaaaaatacatattggagagaaaattgggaggcggtacaagatcaggtcgaaacctttgagaacgagtatcagctgacagaaggcattacgatgcaccacaccggcggccacagcgacggccacagcgtcatcgtcttagaagacggaggggagacggctgtgcattttgccgacctgatgccgacgaacgcgcataaaaatccgttatgggtgctggcctatgatgattatccgatgacctctattccgcaaaagcagaaatggcagacgttcgcggcagaaaaagacgcctggctgattttctatcacgacgcgatttacagagcggtaaaatggggagaagacggcgaagtggctgcatctgtcagacgggagaaaaaataggcggaccgatgatttacctgtatgaatttcgggaataaaagcaaacctaagacaaattgctttgaaaggaagagacaggtgaatcaatttcaagtgacgaaagatggagaaatcaaaacaactctgcgcggattagaagtgctttctacgccttttttaaataaaggggtggcctttacacaggaggaaagagaggaactcggactcgaggggtttctgccgccgaaagtattgacaatcgaagagcaggcgaggcgggcctacgaacaattcagttcgcagcctgatgagctgagcaaaaatgtctacttgaccgctctccatgaccggaatgaaacgttattttacaggctgttaaatgatcatttaggcgaaatgctgccgatcgtatatacgccgaccgtcggcaccgcgatccagcgttacagccatgagtacagaaaaccccgcggtctgtatttgtcaatagatgaccctgaaggaatgcgcgccgcatttcagcagttcggaaaaaatgaaaacattgacttaatcgttgccacagatgccgagggcattctgggaatcggtgactggggcgtcggcggcatcgccatttctgtcggaaaacttgcggtgtatacggcggcggccggaattgatccgtcacgagtgcttgcggtcgtgttggacgcggggacaaatcaggaaagcctcttaaatgacccgctgtatgtcggaaaccagcattcaagagtgcgcggcgagaaatatgaccgctttattgatgagtatgtctcgcttgcccgggaaacattcccgaatgcgctgcttcattgggaggatttcggtacggctaatgcccgcggcatattgaaacggtataaagataaagtctgtacgtttaacgatgacattcaaggaacgggcgctgtgtcgcttgcagctgttttagcgtgtgcgaaagcatcaaaagtgcctttaaaagagcataaagtcgtcgtcttcggcgcgggaacggccggtatcggaattgctgagcagctgcgcgaagccatggtgcatgacggattaagcgaagaagaatcctacagccatttttggtgtatcgacagaaacggattgttaacggatgatatgaaggacttgcgtgattttcaggttccgtacgcgcgcccagctgatgaagtgaaagagtacggccgcagcggtgaaggcggatcaattgatctggcggagacggtgcgtcaggccaagccgacgattctgatcggcacatccaccgtatcaggcgcatttacggaagaaatcgtcaaagaaatggcctcgcatgtcaaacggcccgctattttgccgatgtcaaacccgaccacattatcagaagcaaaacctgaagatttaattaaatggacggaaggccgcgcacttgtcacgacgggaagtccattcccgcctgtcgcgtataacggcgttacctaccatatcggacaggcgaacaacgcgctcgtattcccggggctcgggctcggcacgattgtgacaaaagcaaggctcattacggacaatatgttcgttgcctgcgcgaatgccatcgccggtatggtggacgtcggcaagccgggggcgccgatgcttccgaaagtggaggatctcaggacggtatcggcaactgtggcggtagctgtagcgaaagctgcgattcaggacggtgtagcggaaacagaacccgaggatctgatccaagcggtgcaggatgcgatgtggcaccccgtatataaacgaattcggccgatgtaaccgaataaagcccaaaacgctgatggttttgggctttattttttgcttgtccgaattatgaggcgacagaatcaatgacatcgacaatctggcctgtttttgcattgaccataacttcatattgctccagttcgccgaatgccgaacgtgtcacgccggttttgtatacctggatggtttctccgtttacctggtagggctcgggctctgtgtaaatccatgatccgtctatcggcccgcgctgtttaaaagccgctttcacgatacggagcgctttttctgaagagatataaggtttcatcgcatactttttaactgcgatggcagcgcataatccgactcctgcacctaagagaaaatgacgtaatttcaatatgaagcacctccaattatgtcgtagtttttattatacagaagatgccagacggtgttaagtaaagcggcggttttccagcccattcaatctgagcgcttggaaaacggttgtttttctaataaaataaaagcattacatagaaatgaggggaaaatatgaatgaggaaacgaaaacgcttttccggacgctgacgcagcttcccggcgcaccgggaaatgaacatcaggtccgctcctttatgaaacgggagcttgcgaaatatgcggatgacatcgtgcaggacagactcggaagtgttttcggagtaaggcgcggcgctgaagatgcgccgaccgttatggtagccggccatatggacgaagtcgggtttatggtaacgcagattacggataatggcatgctgagatttcagacgctcggcggctggtggagtcaggtgctgcttgcccagcgcgtcgaggtgcagacggataacggaccgattatcggcgtcatctcaagcatcccgccccacattttaacagatgcccagcgcgcaaagcctatggagatcaaaaatatgatgattgatatcggtgccgatgacagagaggacgctgtcagaatgggaatcagaccgggacagcaggtcgtgccggtctgcccgttcaccccgatggccaacgagaagaaaatattgtccaaagcgtgggataaccgctacggctgcgggttaagcattgaactattaaaagagctgcacggaaaagacctgccgaacaatctgtacgccggggccaccgttcaggaggaagtcggccttagaggggcgcagacagcggccaatatgattcagcctgatctcttcttcgcgcttgatgccagcccggcaaatgatatgagcggcgataaggagctgttcggccgtctcggcgagggggtgctgctccgcattctcgacagaacgacggtcatgcaccgcgggatgagagagttcgtccttgatatggcggaaacgcacaatatcccttatcaatatttcgcttcaggcgggggaacggatgccggacgggttcacatatcaaacagcggggttccgtctgccgtcatcggcatttgttcaagatacattcatacaaatgccgctatcatccatgtcgatgattatgccgcggcgaaagaaatgctcattaagctggtcatggcgagtgacaaacagacggtcgaaacgatcagagaaaatgtgtgaaaaaataagcaggaccgcataaaggcggcctgcttattctgtttcaaataaataagagagtgctttcatcgcttgattgacggtttcgaccgtgatattggcttttccggaaagctctttcagcggatgatgaagttctttcggacggatgagaatgagcggctttccttttgcgatggcataagaagcatccattgcggtattccactgtttatatttctcgccaaacagggcgatcacaaaatcggctttttccatcagcacctctgtacggaaattgttgatatcagaagctctggcgtcttttaaaacagaatcgggctgcacgcccataatctcttctccgatattgtctgagcgttcatggttttccatcgggccgacaaacgtaatcggcaggtccagcgccgttgctttttgtttgatctcatcccgccaatcactgtggatttcacccgctaaatacacgacaaactgcatcttttgcccctccttatgtacatattcagattttcgtacggctacaagcaaaatggtaaacgaaacttgcttgataatgcaaatgaaatatgataatgatattgcatatagttggtcttgccgtacacagtctggtatgatccaattggacaaacatcagcatataaaaaactcataatccagatggaggaatgacaatgaaaaagattgaaagcacggaagaattgcaaaaagcggtacaagacgattgggcggtatttatgttttcagcggattggtgcccggactgccgctttgtggagccgtttctccctgagctggaagcggactttcctgaattcacttattactacgtagaccgcgatcaatttattgatacattcgcggaatgggaaatttacggcattccgagctttgttgtgtttaacggaggaaaagaagtgaaccgcttcgtcagcaaagaccgtaaaacaaaagaagaaattgagcaatttttaaccgattcccttgctaaagcataaaggaggccacgggctttgaaaatgacgtcaaggaagctggcggatttattaaaacagcgcctgcagcacgagaaccgatccttcttttttgacagagaaaaagacaccctccgtgttgaggatcaaacgaccaaaaaaggcatcacattggagctcccgccgatcattgcgaagtgggagacgaaaaaagaagaagcgatcgacgaaatcgtctactatgtgtcagaagcaatggaggcgatggaaggcagcggacaggagatgtccggaaaggaagccggaatctatccggtcatccgctccacatcatttcccgatcaaacgagcgacggcattccgctcgtgtatgatgaccatacggccgaaacaagaatctactacgcgcttgacctcggtaagacttaccgcttaattgacagccggatgctcgagaaagaaaactggacaaaagaacgcatcagggagacggcgtcattcaatctccgctctcttccttcggtcgtgaaacaggatacggttgcggacaattatttttattttttcagggcgaatgacggctatgacgccagccggattctcaatgattcgattcttcatgaatacaagcaggccgctgaaggcgaattggcgatttccgtcccgcaccaggatgtattaatacttgctgacattcgaaatgaatcgggttatgatattttagggcaaatgtccatgagcttctttgcaagcggcacggtgccgattacggccctttcatttctgtataatgaaggcagactggaacctgtgtttatcatggcgaaaagccggccgaaaaaggattagaaaggatttttcttatgaacgctttttacaataaagaaggtgtgggagatacgcttctgatctctcttaaagatgcagcacgcgaagaaatcggctatgaaagagaaggcgatgtcgtcagaatctttaacaaagaaacaaaagaaacgacgggctttaacatttttaacgtgtcttcttacttacagattgaggacaacggccccgtcgctttgtctgagacattcgttcaggatgtgaatgaaatactgaacagaaacggcgtttcagaaacgctgacggttgacctttctccgaaatttgttgtcggtcacgttgaatcgaaagaaaaacatccgaatgcggataaactgaatatctgccaagtgaatgtgggagaggaaacccttcaaatcgtttgcggcgcgccgaacgtggacaaagggcaaaaagtcgtcgtcgctaaagtcggcgcggtaatgccgagcggacttgtgattaaagacgctgaattaagaggcgttccgtcaagcggcatgatctgctccgcgaaagaactcgctttgccggatgcgccggcggaaaaagggattcttgttcttgaagacagccgcgaggccggcgaagcatttcaattctaactcccataaataagcgcacagaatcgaatgatgtgagagaaagccgttaagcaggcctgcttaacggctttcttcagttgggagcttaatcttttctgagccgcccggcaatggtatactaatatcgtcccagactactaaaaagggagttagagagtgattaaacatgagttggctgaataaattttttgacttatttttaggtgaaaaagaagaagagcatgaacgtgaaccaaacacgcatgcccaaatcccgaaacagcagataccggatcagccagaaggcaaattcacgcgcatggaagatcctaaaatatattacgaatatccgaaagggaatttccgcttccccgtcgttccggacggctataagcgaacggagcaaaaccaaagacagcgggaaaggcacgaacgccgccagccgtcccgggattatgccgccgggaaggagcaaaccgagcggaaacagcatacacataaagagcctgaaacggtgaaaaagccctttaaaccgtcatccattccttcaccggtttacggctttcaatctcagcacagcataaaaaaagcgcctatatccgaaaagcggcgtgaagagaacgtaacactgctgtcagaggagcaatttgttccgacaaaagccggtcaggaaacggaaaaagagcccgtcttcacaacatccggcataacaaaacagacgaatgaccggccagacccgtttgtgaaacaagaaacggaagaaatccaggccgttaaaaaagagaagcttcacaccgaggctgagaatgcaaaagagcaagtatttgcagcaccagaaccgcagcaggctgaagagcgggagcacacggaaagcgcggagtctgccggctttacagaagaacaagagcatgaacaaacccgcccgcagcctataatagagcctgagtatgaagcatcccgaacggctgaaaacacagaggaacaagcggcgccgcaggaggaatatcaggagcctgagccggaaaaagcaccgccttttgaaaccgcagaagaaccggtgtatacatacacagaacccggatacgatgaggaagttcagccgcagtctgaagacaagcccgaatcagctgaaaccgacgcgaaacaggaagcagactctcagcctgagtacaatgaagtcacgcggcattcagaccccgagcctgaacctgcaagcatcgagacggccgatgccccgtcccggcctgccgaagaaaaaacggagcatcgcggacagcctcagactgtgagaaaagcggagcggccgaaagagcgcaatgttccgtttaacgtcatgatgcttaaaagcgataaacacaagcagacgaagacgccggagggcggagcgagctatgtctttccgaatctgtcgcttctggacgtaccgccggcgcaaagacatgacgaccaatcgtggattgaagaacagcgcgagcttttaaacgttacactgaaaaactttaatgtgcgcgcccaagtcgttcatgtcacacaaggcccgtccgtcacacgttttgaagtgcatcctgagcccggagtgaaagtaaacaaaattacaaacttagcagatgatattaaactgagcctgtctgccaaggatattcggattgaggcgccgatccccggtaaaaacacgatcggcattgaagttccgaaccgcgtaagcaaagtcgtcgatttaagacagatgatcagaagcgccgctttcaggacgaatccgtctccgcttacagccgcgctcggtgtcgatatttccggaaacccggtcgtcattgatttgaaaaagatgccgcacgggttgatagcgggtgcgacaggatcgggaaaaagcgtctgcatcaataccattttggtcagtctgctttataaggcggatccgagtgatgtcaaaatgcttctgattgatccgaaaatggtcgagcttgcgccttataaccaaattccgcatttggtcagccccgtcatcacggacgccaaagccgcgaccgccgcgttaaaatgggttgtggaagagatggaacggcgatatgaactgtttgcccattcgggtgtgagagatatcggccgctttaatgaattaaccgccgatcataagacaggcgaaaagctcccgtacctcgtagtggttattgatgagcttgccgatttaatgatggtcgcgccgaacgatgtggaagaaagcattgccagaatcgcgcagaaagcgagagcctgcggcattcatctgcttgtcgcgacacagcgtccgtctgtcgatgtcattaccggaatgatcaaggcaaacataccgacgaggattgcattctccgtctcaagtcaggtagattccagaacgatcattgacatggcgggagcggaaaagctgctcggaaaaggcgacatgctgtactgggaaaacggtaccggaaaaccggtgcgcctgcaaggcaactttgtatccgacagagagattgaccgcgtcgtctctcatgtcagaaagcagctgccgccttcttatttgtttgaacaggaagaactgatcaggcagggaaccgccctcaaggaagaagacgaactgtttcctgaggcgtgccaattcgtcgtggagcaaaacagcgccagcacctcaagccttcaaagaaggttccgaatcggttataaccgcgctgcgaggctgattgacatgatggaagccgaaggcatgatctcagaagcgaagggcagcaaaccccgtgaagtgctgattacggccgctgacattgctcaagaataagaatatcgttcatttttctcacaaacatggtatgatagtggatggaccatcaaaactgcatcactgtcacgcgctgaaatatcatgcggcaggtttaatcaaaaagaaagttacagatactgacgataacgtaaaaataaatggaagcgccgctgtgcgggctttttgcccgcggcggtcgcaaaatgaaatgagcgtcatatactggggaacagatagacgtttgttggaggtacgattatgactgtttatcattttgttggaataaaagggacaggtatgagcccgcttgctcaaatcctgcatgatacggggtatcaggtgcagggatcggatatcgagaagcagattttcactcaggctgcccttgaaaaaagaaatatcccgatctatccgttcagcgccggtaacatcaaacccggcttaacggtaatcgccggaaacgcattccctgattctcatccggaaatcgcaaaggcgctcgctgaagggattcctgtcatcagatatcataaatttttagctgaatatatgaaaaaatatacaagtgtcgcggtaacgggcgcacacggcaagacgtccacaacgggcctcttggcacacgtgatgcagcaggcgaagccgacttcgtttcttatcggggacggaacgggcagaggaaatgaaagcagcgaatactttgtatttgaagcttgcgagtaccgccgtcatttcttaagctatcagcctgattatgcgattatgacgaatattgattttgaccaccctgattatttcgccaacattgacgatgtgtttgatgctttccaaaacatggcgcttcaagtcaacaaaggcatcattgcctgcggtgatgacgagtacctgccgaaaattcacgccaatgtgcctgtcgtttattacggcacgggagaagaaaacgattttcaagcgagaaacatcgtaaaaaatacggaaggcacgacatttgacgtctttgtccgcaatacgttttacgatacgttctacatcccggcatacggccatcacaatgtcctcaattccttagcggtcattgcgctctgccactatgaagagatagacgtgaacatgattaagctcggacttgaatcattcggcggcgtcaaacgcagattcaatgaaaaagtgatcggcagccaggtgctgatcgacgactacgcccaccatccgactgaaatcaaagtcacgattgaggcggcgcgccaaaaatatcccgaacgtgaaatcatcgcggtatttcagccgcatacgtttacacggacgcaatcattcttggatgaattcgcagaaagcttaagcgcggccgatcgcgtgtatctgtgtgacattttcggttctgcccgcgagaacgtcggcaagctcacgatcacggatcttcaggaaaaaatcgataacgcagaactcattgaagaaaatgacacatccgtgttaaaagcgcatgaaggcgcagtgctgatcttcatgggcgccggagacattcaaaaatatatgagagcctatgaaaacgtcatagcgtaacgaaaaagcagtggggctctcactgcttttttgtgcgtgctgcaaagggattcaccgagaaacggagaaatagtatacatacagatctttcatatatgtttatcattttaagaattgggtatataccactatatcctgcattaaggaggtattagatgattatcattctttacttaagcgtcgcactcattgccgttgcatttctcatcctcgtcatctatctgtccaaaacattaaagtccgtgcagatgaccttaacaaacgttgcctcgactttagacggccttgaagggcagatgaaaggcattaccgcagagacaaccgagctgttacataagacaaatcgtctcgcggaagacattcaggaaaaatcagagaaattaaatacggttgtccatgctgtccaggaagtgggaacttccgttcagcagtttaatacatccataaagcaggcagcaggttccgttacggcctctgtaagagagaatcaggataagatcagtcaggttgtcacctggagccaggccgctatggaaatatgggacaagtggaagcaaaagaaaaaaacatcgctttaatcataagaaaaatccactaaggaggaatcataatgagcaaagatggaatcaatagtaaggattttttaatcggaacgctgatcgggggaattatcggcgcgacaacggcgttgtttctggcgcctaaatcaggcaaggagctgcgcgacgatctcggcagtcaggcttctgcgttaaaggataagacggacagaatgacggccgacgcgaaagaaaaaggctctcaatatgtcagcatcgccaaggacaaaacatctaatatcacccagctggtagctgatcagtcaggccagattatgaataaagtgaaggatttaaaagaccgttctaagagcacactaactgagaaagccgaagagacgagaagcgaaatgcaggacacggcccaaagcatcaaggccgaagcggaagacgccggggaaaaagccggtcaggcaaatcgctgatcttcaataaggagagataaccgacatgacaaaacagctgatatcgtctgaagaagagttcaaaaatgccgctgagaaagaaaacacgctcgtgtttttgaaacacagcacaacctgcccgatcagccaagccgcgtttcaggagtttgacgcctttgcatcggcgcattcggaagtgccttcttattacctgcaggtgcaggacagccggccgctttcaaactatatcgccgagacatacggcgtgaaacatgaaagtccgcaagtattcgtcatttcaaacggcgaagtgaaatggcacgcgtctcattcacaaatcacaaaaaacgcaatagagcagcacctttcataattgctggccgccggtttataccggcggttttttttgaaaaaaactattgatcatttcagccggatcgtgtaggatatcaatatataccgcttcaacgcataaaagcttaaaagcgtttttgtaataaagccgaatgtgaaaaaatttattatttcatattcctattttcgcataactgtagtaagatgcatgttaatcattaaaataaaacatagcatagaagggatgaaaaagatgagcaacaaggaattagagagcctaagacagcaggcagacgcactaaatctagaaatccttaaattaatcaatgaacgcggagccgttgtaaaagaaatcggtaaagcaaaggaagcacaaggtgtcaaccgatttgaccctgtcagagagcgtacaatgcttaaccgcataattgaaagcaatgacggcccatttgaaaactcaacgatccagcatattttcaaagaaattttcaaagccggacttgaacttcaagaagaggaccacagcaaagcgttgctcgtctcccggaagaaaaaagcagaagatacgatcgttgacataaaaggtgaaaaaatcggtgacggcgatcagagattcatcgtcggaccttgtgccgtagaaagctatgagcaggttgccgaagtagcggccgcagcgaaaaaacaaggcattaaaatcctgcgcgggggcgcgtttaaaccccgcacaagtccgtatgatttccaaggtctcggcgtagaaggcctgcaaattcttaaacgcgtcgctgatgaatatgacctcgcggtgatcagtgaaatcgtaacgcccgcacacattgagcaagcgattgattacattgacgtcattcagatcggcgcgcggaacatgcaaaactttgaattgctgaaagcggccggctccgttaaaaagccggtattgttaaaacgcggtcttgccgcaacaatttcagagttcatcaatgcagctgaatacatcatgtcacaaggaaacgaccaaatcattctttgtgagcgcggaatcagaacgtacgaaacggcaacgagaaacacactcgacatttctgccgtgccgattttgaaacaggaaactcacttgccggtatttgttgacgtcacacactcaacaggccgccgcgatctcctgcttccgacagcaaaagcggcgcttgcgatcggcgctgacggcgtgatggccgaagttcaccctgatccttccgttgccctttcagactctgcgcagcagatggatatacctgaattcgagaaatggctgaacgaattaaagccaatgctgaaagtaaaagcataatacaacgttccgctctttaaaggccgcctcgcgcggctttttttcgtatcttcattttatttaattataaaatgaaagtgaacgttttcatcactgggaaaaacgtgtataatttcatgagagatatttaaatttgatgaataatgaaaaataatgtacactactgacttacgcttacaatcataaacgacagaatgcgaaatcgtacgacatttctttacataaagtgtttatgctatagataaggataagtgtatccagtaaaaggagtggtttcagtgagcaacattacgatatacgatgtggccagagaagcaaatgtcagtatggcgactgtttcccgcgtcgtgaacggcaacccgaatgtaaaaccgacgaccagaaaaaaagtattggaagccattgaccggctcggctaccgcccgaacgcggtggcaagagggcttgcaagcaaaaaaacgacaacggtcggcgtcatcatccctgatatctcaagcattttctactctgaacttgcgcgtggaattgaagatatcgcgacgatgtacaaatataatattattttaagcaactcggaccaaaatcttgagaaagaactgcatctgttaaatacgatgcttggcaaacaagtggacggtatcgtatttatgggcggcaacattacggacgagcatgtcgaagaatttaagcgctctcctgtgccgatcgtattggcggcatcagtggaagaacagggcgagacgccttctgtcgccattgattacgaacaggcgatttatgatgccgttaagcttttcattgataaagggcatcgcgatattgcattcgtctccggaccgatgcaagagccgatcaaccgttcgaaaaaactgcaagggtacaaacgggcgcttgaagaagcggcgattccgtttaacgagcaattcgtagcggaaggcgattacacctatgattccggtatggaggcgcttcaaagcttgatgggccttgaccggaaaccgacggcgattctttctgcgacggatgaaatggccctcggcattatccatgcggcccaagatcaaggtctttcgatacctgatgatcttgatattatcggttttgacaatacgagattgagcctgatggtccgccctcagctttcaacagtcgtgcagcctacgtacgatatcggcgccgtggcgatgagacttttgacaaaactgatgaacaaagagccggttgaagagcatatcgtcgaattgcctcaccgcatcgaattaagacaatcaaccaagtcataaaaaaacggaaaagcaagcttcactctgaggggtggaatcttgcttttttacttgagtaaggagaagatatgaaacgttttgattatctgacgcccgttggctttatgttaggctgtattattgtcgcaatcggtattctgtcagggacgggactggcgggaatcagttcatttttagatttgacttcttttttaatcgtcacaggcggccttgctgcggcgatctttatcagttttccgccgagggatttaaagaaaaccccttctgttctgaaacaggtattctcccgtcaggatgacaatgtgaaagagcttgtcagagtatttgtcagcctttcggagcaggcgcgcaggcaggggcttctgtctctggatgaccgggcgcgtgagatcaaggatccgtttttaaaaaaagggcttttgcttgcgattgacggctgggacgaggaaacgatccggctggtgatggattctgagatcgccgcgatggaagaaagacacagaaaaggaagacgcgtttttgaaaaagccggtgatttcgcacccgcctggggaatgatcgggacgctcgtcgggctcgttctcatgctcaaaaacttaaatgacccgcataccctcggaccgaacatggccgttgcgctattgacgacgctgtacggagcgctgcttgccaacttggtgtttatcccaatcgcggcaaagcttgaagaaaaaacggaaagtgaaattttcatcaaacaggtcatgatcgaaggggttgtcggcatccaatcgggcaaaaacccccgcaacctcgaaagtcagctcgttgtcttcagctcaagagaagactggcgtaaaggacagcctgcgaacaagaaaaagggcgctgtccatgaagcttagaaaagagcgttttgaaagaagaaacaaaccggaacattccggcggttcaccgagatggatggtgacgttcgctgacttgatcacgctcattctcgtgttctttatattgcttttttcgatgtcgcaaatagacgcggaaaaatttcaatctgccgtttcatcgattcatacaaacggcagcgggggtgaatcggcgtcatcagacaaagcaaacgaaaataaagaacaggatttgctgttacaaaacgtgaagacatacataaaagcgcatcatttgagttcgaaattgacggcgaagcgcgatgagcgcggagtggttcttgtgctgcaggaggccgttctgtttcagacaggaaaagcggatgtgctgaaaaacgccgagccggttctgcatcagatcgcggtgcttttaaaaacaattccaaatgacatacaggtagaaggccatacggacagccgccggatttccacctatcaatttccgtcgaattgggagctgtcgtctgcaagagcggcgagtgtgatccggtattttaccgcaaaggaagacttttccgccaaacggtttatctctgccgggtatgcggatacgaaacctgtgaaggacaacaaaagtcccggacatatgaaagaaaaccgccgtgtagaaattgtgatcaaaaaaacgacctcctcataaggtcgttttttattttgttttataccgctgctcagaccggatggcaaaaagtgctttttccacggtttgggcatttttttctgaaatttcttctttgcggggaatcggaggatataattgttcaggatcactccaaaaagcgggcaacgtgcatggggagtgcttttgccatttatcgatccatttctgcggtatgcactccccgggatcaatccctttcatctcaagccaaatgcggctccacgctctcgggacgactctccaaatatcgtatccgccgccgccgaccgcgatccatctgccgctgcaatattgatgggctaatgaatgagcgagccgcgggatctcctgataaatggagattgtattggacaggtgtgtcaatgggtcgtaataatgggcgtccgcaccgttttgggtaagaatcacatccggcttaaaaaaagccgcgatttctgaggcggccgtattgtaagcgtgaagaaaggaatcgtcctctgtgaaagcatccagcggaatgttaaaagaatagccgtagccttgcccgcttcctttttccagtacctgtcccgtcccgggaaataaataacgcccggtctcgtgaaaagaaacagtgcagacatcagacctgtcgtaaaacgtaaattgaacgccgtcgccgtgatgggcgtctgtatcaatgtataacacttttgctccgtagtttttctggatgtattggatggccacggcgctgtcattatagatacaaaagcctgaggccctgccgcggaagccgtggtgaaggccgcctcctaaattgcaggcgtgcctagcttgtcccgtcatgacataatcagccgccgttaaggtgccgcccaccagaagtgacgcggcttcatgcatgccggcaaaaacgggggtgtcttccgttccgagaccgtagctttctccttctgcggcagggagccggcccgcacccgctagttccaccgcctgtatataatcctccgtatgaacgagagccagctcttctttagcggccgtgcgcggtatgacgatatctccttcgtcaaacgcatccgccgcctgaagcagatcgtatgttaaaagcacgcgacgctgattgaacggatgttcctgatgaaattgatacgtctgataagaaggcgagtaaacaaaaacgctgtctctcatggctgatccctcaaatgtttcggccataagacattgtatccggcttcttgaacggcacggataaaagggagcggattcatcgtcttcacccggaagacgagaatgttcgacccggcggaatcatggggatagacgagcacactcaggatttgcagctgaagatcacggcacatgcagctgagatcagcaaggctttttgtcatatccgtcaccaggatttccacctgtgaccccggctgggccgcgcctgtcaggctgacgaaagtccggagcacgtcggttttcgttaaaatgcccgtcagcttatggtttaccgtaatcggcagacagccgatgccgtgctcataaaaggaagcggatatttcttccacaaagtcaagcggatgagcgcagatgacattccgcttcataatggtctccactttgtttgtcagaaacacgccgcgttccttttgttcaaagctgccggggccggcctgtttaatgtctctgtctgtgacaataccgatgacgtgcagttcgtcgtcgatgacagggagatggcggatatgatataccttcattttacggacggctgtttcaatggagtcgtgttttgagacggtgatgacgtcccgtttcatgatttgttctgcaatcatctttttatcccctttgtatgtcagtcaatacataaatcgctgataaaaacgaagcctgtcgaactgttcaattgactcctgactgacgtgcctgccgatgcgggccatcagacaattggccgggtgagagctgatttccggttcatccgttgcgaaccagacaagacccccggcattcatcatcttttccatgatctttctgtattcccacacatcttttttcattccttttaaatcccaatgccagtaatattccgtcgtcatgatgatgtaccgttccatctgttcatccatcatgctgactgtcagcaacgtttttccgacagaacagcccctatagccgggagcgacctcgatcgccccgagttcaaggagatcttccatatttccgtcagaccaccgttcaagcggatcaggatataaatacgtcacatagccgataatcgtctgtccgtccctggcgataatgatccgaccttcaggaagcccggcgatctcgattaacgctttgtgctgttcatgaggaaggcgaaaggctgtcaggccttcatgaaactcatactgtgctaggtcctttggaggaacgggcccttctaccaatagagggccggctgctgtctgaattgatgaagaatggtacgttttatgatgtttcactgattcaccgcctgtcggttcttaataaaaacacatctctcttaagcataacaaaatataaagcgttttcaatagtgttgtaatttatattttaaaaattgagaaaactgtgaacatctactataattagtctatagataagcaaagggggatgttgcatgaatttgaaagcgttgccggcggaaaaggggaattatcatctgcgaaattatgaggaaacgtaccgcagcttcgattggaaagaggtcgaagcggagttttcctggcatcagacggggaagctgaatgcggcgtacgaagcgattgaccgtcatgccgaatcatttcgaaaaaacaaagtagcgctgtattacaaggacgcaaaccgggatgaaaaatacacatttaaagaaatgatggaggaatcgaaccgggcgggaaatgtactgagacggtatggaaacgtggaaaaaggggaccgcgtttttattttcatgccgcgttcgccggagctttactttatcatgctcggcgcaattaaaatcggtgcgatcgccggtcctttatttgaagcgtttatggaaggcgccgtcaaagaccgcctcttgaacagtcaggcaaaggttgtcgtgacgacacctgaactggccgaacggattccggcggacagcctgcccgacctcgagcatattttcattgtcggcggcagcaaagaagcgggagataaaatcatccattatgataaagccgctgagggagaaagcacgagacttgatattgaatggatggacagaagagacggctacctgcttcactacacatcaggatctaccggaacgcctaaaggtgtgctccacgttcatgaagccatgattcagcaataccagaccggcaagtgggtgcttgatcttaaagaagacgatatttactggtgcactgcggacccgggctgggtgaccgggacggtgtacgggatatttgcgccgtggctgaacggagcggcgaatgtgatcgtaggcggcagattcagtccggaaaactggtacggcacgatcgagaagctcggtgtcagcgtctggtacagcgctccgacggctttcagaatgcttatgggcgccggagatgaaatggcatccaaatttgaccttacttcacttcgtcacgtcctgagtgtcggagaacctttgaaccccgaggtcatcaagtggggacataaagtattcggcaagcgcatccacgacacgtggtggatgacagaaacgggcggacagctcatctgcaattatccttgcatggagatcaagccgggctcaatggggaaaccgattccgggagtggaagcggcgatcgttgacaatcagggaaatgagcttccgccgtaccggatgggaaatctcgccattaaaaagggctggccgtcgatgatggattccatttggaacaacaaagagaaatatgattcttatttcatgccgggcggctggtatgtttccggagattctgcttatatggatgaagacggttatttctggttccaaggcagagtcgatgatgtcatcatgacatccggcgagcgcgtcggcccgtttgaagtcgaaagcaaacttgttgaacatccggcgattgccgaagccggcgtcatcggaaagccggaccctgtccggggagaaattattaaagcgtttatcgcgctcagagaagggcatgagccatccgatcagctgaaggaggacattcgcctctttgtaaaacaggggcttgccgcgcatgccgcaccgcgggaaattgaattcaaagataaacttccgaaaacacggagcggaaagattatgagacgtgtgctgaaggcatgggagctgaacctgccggcaggcgacctgtccacaatggaagattaaagacggcgttgacatcgtatcttatttatgttaaaaatgagtaagcttcatacgaaaaggttttgattgagacaagtagggtatctgattgttcaagagagctgatggccggtgaaaatcagcacataagatatgccgaatacactcatgaaccgcttttgcgaacaaagcccttccaaggctttcagtagtgaaagaacggacacggtccgttatcaaaaagagtgataaaagcttttttatgcttttattagtagggtggtaccgcgattatatcgtcccttcgttttaaacgaaggggcgttttttattttcataaacaaaggagcagacaaaatgactaacttattagaggatttatcattccgcggcttaatccagcaaatgacggatgaagaaggactgaataaacagctgaacgaagaaaaaatccgtttatactcagggtttgacccgacggctgacagcctgcacatcggacaccttctgccgatattgacactgcgccgtttccagcttgcaggccaccatccgattgcgcttgtaggcggcgcgacgggactgatcggcgatccgagcggcaaaaaagcggaacgtacgttaaatactcaggatatcgttgtcgaatggtcgcaaaaaattaaaaatcagctttcccgatttttagatttcgaggccgaagaaaaccccgctgtcatagcgaacaactttgattggatcggaaagctgagcatcattgaatttctccgtgacgtcggaaagaacttcggaatcaactacatgcttgcgaaagataccgtaagctcaaggattgaaaccggaatttcttacacggaattcagctacatgatcctgcaatcctacgattttctgaatctgtacagagaaaagaactgcaaactccaaatcggaggcagtgaccagtggggcaacatcacggccggtcttgaactgatcagaaaatcagaagaagaaggggcaaaagctttcggtcttaccattccgctcgtcacaaaagctgacggcacgaaattcggcaaaacggaaggcggcgccatttggcttgataaagaaaaaacatcgccgtacgaattctaccagttctggatcaatacagatgaccgcgacgtcgtcaaatatttaaaatactttactttcttatcaaaagaggaaattgaagcttatgctcaaaaaacggagacggctcctgagaaaagagaagcgcagaaacgtctcgctgaagaggtgactgttcttgtacacggccgcgaagcgcttgagcaggccgttcatatctcccaggcgctgttcagcggcaatattaaagagctttccgctcaagacgtcaaggtaggatttaaagatgtaccttcgtttgaaaaagaccgctctgaagaactgtctttagtagacgtgcttgtggaatctaaattgtcgccttcaaaacggcaggcccgcgaagacattcaaaacggagctgtttacattaacggcgagcgccagacggacatcgggcatcttctgactgcggaagaccgcattgaagatcaatttaccgtactgcgccgcggaaagaaaaaatacttcctgatcacgtactgaaaataaaaagcagtccggccgctcaatgcggcaggctgcttttttatgttttgtgaatactgcacggggaaatgagtacagtacatagtataagcaaaacagggaaggggtgctgcgccgtgaatttcatgtttaccatcgcaaaagaaagattgcagcgggatcattgggaacagcagcaaagcataaacgccgaagccaaagccgaggaatcagagacggaagaagaaaatccgacatcataaagggaaatcctccattctgcggaatggaggattttgattgtcaccatatcagcctgaccgcggccatcagcacgactcctgtgatgaccgtgatggataagctttttgtccgcattgcgcaaagcaatgtcgggatgagaacgatcattgcttgccaatcaaaggtcaaagcgctgtttgttttcacaatcatgctttccgttaccagagccgtcaaaatgcaaagcggaataaaggagagccattttaaagccaattcaggcatctgaatgttccggacaaatataaacggaacaatgcgcggcacgagtgtaacaaccatgcagccgagtataatccagatcatttgtgtgctgatgctcatttgtccgtcaccaccccgatcgttgccacaatcacggttgaggcgatgaccgcgatgtgtgacgggacgaaatacgataacaagaccataaaaatgatcatatagagaattaaggagaggctgtgcttcagcttttccgaagcggacgactgcaattgcagcacaagcagcgccgcaaacatagcgggcaaagcaaagtccaggccgagcgcgtaaggatcagatatccattgtccgagaagcccgcccatcacgcaggaaataacccagcacatgtaagcggttatattgaggccgttcatccacttatcgtataacctgccgttctgagccgctttgttcaccgctaccccgaaagattcgtcagtaagcaaagccccgaagccgatatttttcagcaaagagtatttcgtgaaatacggcgcgatggtcaggctcagcagaaggtgccgcagattgacgataaacgtcgttaaaataatggcggaaatcggactcccggaaacaaggagtgagcaaataataaattgggcggcgccggcatagacacacaaagataacaaacaaatttcaagaatgcttagatgagaggcaacgccaacgatgccgaaagcaaaaccgatgctcatatagcccagcagcgtaggcacacaatcccgcaccccctgtaaaaacgtatcgttcatttcccgggaaacggcggttttttgcacttctgtgttaatcattttttatactcctttcatagagattataatgataacgactaatgaaaaaatcaaagaaaatacggttcacatttaaatgaaccgatttccggtgacgacatgaaataacgaatggttttgtttcatcaggccttcaactttctcagcccctacttctttcacaagctccgcgaacatcagatcgtgcctcatatattccatagccacgagaacgagagcgggatcttctgatttaatggcccaggcattcgtctgcggagaaaaattggcgattaagacttctttattatctcgggcagctatcgttaatcttccgcccatccgtttctccgccacttcaggagacatattatgatgtgtcgtatttccgagcttcacttccggagggccaaacacaatcgaaaagacgggcaattgttcggcggcgcgtttgttagcggcttcttgaataaagggaatctgctgttcccagacagacagccacaactcttcctcggctttttcaatcatatccttcatctcattgatgacatgatcattcgtgctgatgcggcggatgacattcatctcctgctcgctttccagcgccaataacttttcctcaaggtagccgaatgagctctcaaaatcatgccggagccggtcgattaattcttttccggccagcggggcatatgtaaccggatcagacggcacaatatggacagcgcctttatcaactaatttccccaatacctcatagatcattgagcggggaacgcctgaccttttgctgatttcatatccggtaacaggcgagtgtttcaacaagccgatatatgctttacattcatattgagaaaatccaaatttctgtaattctttcagaacatcctccataaacatcctccgtagtggttattcatgaaactactataatgtaagcggttatatcttgtcaatgggacttgagtgctgaaagaaagatgcgcccgttttgtcgctttccaacttagtttatggccagttacatgtatggcttttgtgaaaaacgttgccgtagacccacacgaatgccgtttgatacgataaattcaagaagtaaaaaagaggaggatcacggtggaaaacacctctaaaatcgcttttttatcggttataagcaattccctggtcgtcatgctcaaaatagtggtggggataataaccggatctgtcgcgatactttctgaagccattcattcttttttagatttgatcgccgccttcattgcctttatctccgtcaggatttcaaaaaagccggctgatacagggcatccgtacggtcatggaaaagtcgagaatctgtcggggactatcgagacgattctgatttttgcggcagggatttggatgatatatgaatgcgttcaaaaactggtcaaccccgcgccggttcatctgcctgtattgggaattgttgtgatgcttgcgggggctctcattaatttgatcgtttcgaagttcgtaaaaagagaagccgaaaaggttaattccgtggcaatgaaatcaaatgccctgcatttactgactgacgtgtacacatcattaggcgtagcggcaagccttttggtcgttaccttaacggagtggtacatacttgatcccattataggtatggtgctggcggtgtatatcatatatgaagcgtttaagttaatgaaagaagcattcccgccgctgattgatacccgtttgtcggaagaggaagaaaaaacaattttaaagattattgaaacatttcaacaggaatttattgaaattcacgattttcgtacaagacgctccggcccgcaggagtatattgattttcacctggtcgtagcctctcacgtgacgattaaagacgtgcacgacctgtgtgaccgcattgaaagagatattacgaatgaattcaaacaagcacaggtaatgattcaccccgagccggagagcgagaggaagaaataaatcgatcttatgttttcgtttgttcccggcaaaatgtctgcaaaaggcccgttcccacgggtctttttgttgtgtaaatgaccatttctcgctcatatgagagagaagcttatacacgtgaggggttcatttcatacgttatgttgtaaagaaaaagggaggtgaacagaattgaacgctatttctgttaaagaaattgaacatggagttgccgttgcggaaagagaaggtttaggggagtatttataccaagaaccggtttctaaaaaatgttcgcgccgttcccgcagcagaaaacggacacatcgttctcgcagcagaagacggacgcatcaccggacacatcgttcccgcagcagaagacggacacatcaccggacacaccgttcccgcagcagaagacggacgcatcgccggacacaccgttcccgcagcagaagacggacgcatcaccggacacaccgttcccgcagcagacggtcccatcaaaaacgcacccgcaaacgctgttttaaatgctgactgcagactctgttacaagtaacggggatctgctataatggcaagagaactgcataaaagatccggtattcatcatctgcggacactgaactgacaacatagcgctgtttgttcgtgtccgtttttcatgccaaaaaagatgccggaggataaaaaggaagggatgacgccgaatgaaactgaatgaggatttttataactctgaaggaaagacagtctctttgccaaacatcagcagcaagcttttgcatatcacggacagcgggcatatcagcgttgacttcatcagcataagcaggctgaggaaggcttcaaaaatcgcgatcttaggtgacagcgtcgcccgggggctgcgtgcggaatacggctttggtgacattctgaaagaccggacaaacgctgaaataaccaatctgtctgtcagcggcgttaatatgagcaacaacggaagcgataacatttatcagcaggcgcttaaaacaaagggacatgatgtcatcattgtccagggaacagatgatgattggtgcaaccacattcccatcggcacagatgaaaaggatatcaccacattttacggaggcttctgccaagtgatccagcagctgcggagcggaaataaaggcgcgagcatcattgtggtgaccccaacgagacaagcaaaaatatcaaaaggaaaaatcgtccgccgtgatactgataaaaataaactgggcctgaagctggctgactatgtgaaagcccaaaaagaagcctgcacactcctctctgtaccgtatgccgacctgtttgatacagatctcatcgacccgtataatcccgctttccgcagcatgtgcatgtcagaaggtcttcatccgaacgagaaagggcatcaaatcatatttcaggaaatctgccggaattattattactattatgggtaacacagcgctaacagattattttcggctttgcttttctaaaagctcaattattctttgagatgcgtgtttttgcgctctcaaaagcgagacgatattaccggtaaaaccgattaaaatgataagcagcaaaatgatcatccacataagtgaacctcccgtcgggttttaaaacattctctctttattttacttatgatggatgggccggagaataggtctaaacgaacggtgtttctttaagagtccataaaaaatgcacagactgaacgggtctgtgcttttttctcttatttcagcaggttcaatgattcacgattaaaggcttccaaatcgtcaggtgttctgctcgttacgatgttatggcttacgacgacttcttcatctttataatgtgcgccggcattgattaagtctttgcggatgctgcggaatcccgtgatatcttttcctttaagaaggtcggtatcaatcagcagctgcgggccgtggcagatcgcgaaaacgggtttctgattttccacgaatgctttagtgaattcacccgggcggtcatctccgcgcagaagatccggtgaaaagcctccgggaatcaataacgcatcgaattccttggcgtctgcgtctgagatcgcttgatcgatctttactttcttaccgtgcttgcccgtcacttctttccctgcttccaaatctattgtcaccacactgtggcccgcttctttaaatgcttccgccgggcttgtatattcaatatcctcaaattgatctgtcatcagaactgcgatttttttgctcatacatcatgccccctgtgaatttgtatatgacaagaatatcaggcggattgccgcctcacaacgtatttgcttgaagatacggcatgaaaaaaagactcctctgaaaaagaggagccaaaaggtacggaggtctgctgaaacttacgtgtttaacctgagataaggcaagaaatcgaaccaattactttttgtgtctttttttattctttttacacccgcatttccccggatctcccggatcaatgacttcgtgaattgtttcttcctgataaacgtggcggggaacataacggatatgctctctgttaatgtgtttgatgggatggacgtaaaccacttctttgtcagtatacttgtcagtcacaatatacttagggtcacagtaatacactttcgattttttacccattcatctcacctcccgtactttattaaatgctgacaaggaggattttgcatcggacaagtaccccatggcaagtccacaattttttatatgcaatttcgtttttctggtttttcctgaatccgcctcaaattggaatggctaaccctttttgagcggggaaatctataaaaaagaattcaaaaacgattcttttctcaggtcaatcgagatgcatacatctttagggggatttcagaatgctcgatgaaaaaacgattgaaatcattaaaagcacagtgccggtcttagaagagcatggtgaagaaatcacaggccgattttatgacctgctgtttcagcatcaccctgagctgctgaatatctttaatcagacaaatcaaaagaaaaaaacacagcgtacggccttatcgaatgctgtgattgcggccgcagccaatattgacaggctggaaaacatcgttcccgtcgtcaaacaaatcagccataaacaccggagtataggtgttaagcccgagcattacccaatcgttggaaagtacttgttaatcgcgataaaggatgtgctaaaagacggggccgctcctgaggtcattcaggcatgggaaaaagcatacggcgtcattgcagacgcttttatcggaattgagaaggacatgtatgaacaagcggaaacgcaaaaaggcggctggaaagactataaggcgtttacaattgataaaaaggtaaaagaaagcaaagagataacgtcgttttatttaaaaccggaagacggacaagttctccccgaattcaaagcggggcagtatatcagtttaaaagtatacattccggacacgggctatacgcatatccgccagtacagcttatccgacgtgtccggtaagggttattaccggatttccgtgaaaaaagaaggggttgtttcctcatatctgcatgaccaattacacgaaaaggattcaattgagatcagcgctccggccggggatttcgtattagaccctgattccaaaaagaatctcgttctcatcagtgccggtgtcggaattactccgatgatcagcatgttaaagacggttgccaaaacccagccgcagcgaaacgttctctttatccatgcggcaaggagcggagagtatcatgcgttgcggcatgaagctgaagaagccgcggaacactcatctgttgacaccctctttatttacagcgagccgtccgaacaagaccgttcagaaaacattcgttttcgggaaggccggattgacaaacagctgttagaagaagtgatgacagataaagatgctgatttttacatgtgcggatcaccgtcgttcattaaagaaatgaaaaagctgatttctgaattcaatacaccgccggaatccattcactatgaattattcgaaccgcagctgagtatggtgtgattgaagaaggaaggacgatgattttaatgcatgaagcacccgcattgggtgcttttttattttatatcggccccgtttgggggagtgggtattttcttccttgaaaaagcagttcctgaaatgccattccatccttggaaatattgcttttaccagtaaacggggttctcggctctgctgatctcggaatttttgaccgcacaggcgtttacagttaacgaaatatggtcaaaggtcagaaaaaatgaaacatgaatttgcttaaaaaagatattttgatcattattgattatctgcagtaatttcaggaacagctattggcccttccgttttatctttaagacccgcgttaaaaagcgaatggccgacacgattgtaaaatttcagctcgtttcaactgtgaacgggtggggatatattgagtacaccaattcaaaaggccagacatttcacggatacgtgaaaatgttgttttatataaagagtgataatgagctgaaaagcagcggaaaaaagaacgctgtcgtaaagcccaaaacaaagtttcaaagtcacaaacccattaatcaggggcgcagccgtaaaataaatacatgacagcgttggcggctctttatttctatccggacaaaaggagtatcagtgggattgatagcacatatgggctaaaacatcaaatgcagtcaaacgattacagtcaatgtatgggttgacccctgatggtatttacgggcaggaaactagatataaaatcctacaattattgagataagtagttgtttataccttccggtggtcaagtgagtaaaactaaatgatcaggggtgaaaaaagctttactggttaattttaaccgaagtatggtgctggggtttttttgaaaaccagagtttgatatggttttttaaaagaagaaatgtattttgaaatttaagatttttggttcagtaatgtctatcgcaattgcatctagtttaaccttgccgtcatttgcttcggctgaaactttctcagcccctaaagtttctaaggagtgttcacaaccattatcagagggagaggtgaccgataaatacgggaaacctattgaattaaaagatacggatactgatatgaaaattgcattagagattgcaaaatctgatttagaagaaaaggcagtagttaataaagagggttttgctgaaaacttttacaagaatgcaaaagatgcaaatgttagtaaaaaagctttcgaggaatttaatgcatcattggaaaatttaaataagggtgtaaaaaacggtcaatataaattgggtagtaatatatctgatataaaagtttctggagcagaagatagtgatgtttctgctcaagcatcatggttcatctctcattctaaatctgcaaaagcccaaaaattaattttggcgggtgcaggagtttctttgcttgcttctgaattaggtgttccagttctcgtggcttctggtttagctgcactagcagccggagctggcctatgtgattggaatgacaagggtttttatttggtctatgctgctaacattttttattgtgttccaaggctttaaaaaattaaaagagttcaggtgggctaaatgcataaaattattaattacatcttggtaagcttgttattggtgtatatcattgtttccttttctttggattttagtaacaatgatattccatatatttttgttgctctgattcttatcattgtttcctttatctatgagaagagaaagtcatataaaaattgaatttttcaaatagaaaggccttttctagacggaagggccttttagtcatatgagtaaactggcctctaaaaatgttgcaaatatattaaatgattggtatatcgcgataaaacaacaagacgctgagtctgctgagaaatattttgaagagatcaaaccgcttttagatgaaatgggagacgaaccgattaattggtgtatagaggatttataaaaagcgcagatactctgcgcttttttatttaagtattttccgaatcattcgcagcccgtttttggaagaaggataacggaaagcgaagtcgaagcggttcgtttgtttgacgacgctttttttgtgcgtaaacgtgttaaagctgtcaaatccgtgatagctgccgatgccgctttccccgacgccgccgaatggcaaatacggtgtcgcgacgtgcattaacgtatcattgacacagccgccgccaaacgacagattctctaaaacagttcgctcagtttctttgtttgtggtgaagagatacagggcgagcggctttgggcgtgattggactttctcgatgacttcatcgatatcgccgtatgtaaagagcggaagaatcggcccgaaaatctcctcctgcatcactggagagtcatccctcacttgttcgagaatggtcggcgctattttgtggtgatcaggattaaattgtccgcctgtaagcgggacgccatcattcagaaagctgagcagccgctgatagtggcgttcactgacgattttgccgtactgcggattttgttcaggctgagggccgtaaaattcactgatcgcacgcttcatttcttctgtgagcttcgttttgatatcttggtggacaaataaataatccggtgcgatgcaggtttgccctgcatttgtaaatttcccgaagacgatgcgtttggcggcaagctgtatatcagcatccttatggacaatgcagggacttttgccgccgagctccaaggtaacgggaattaattgtttggcggcggcctccatgacgatttttcccacggcaacgcttccagtgaagaaaatatagtcaaagggctgctgtaataacacagtgctgacgtcgggcccgccctccgccatagcgacatagtcactcggaaaaacgctgctgatgagtttggaaagaacagcggaaaccgccggcgtgtattctgacggtttaagaacgactgtgtttccggccgcaatggctccaatcaagggtgaaagcgccagctgcaagggataattccaaggcgcaatcaccaaaacggttccatatggctcagggataatgatgcttttcgagcctaggtgagtcagaggcgttttgactcgtttcggtttgatccattttcccagccgcttcatcacaaaactgatttcctccagtacaattccgatttctgtcgtgtacgactcctgttcggatttgtggagatcctgatagagagcggctgttatatcggcttcttgtgttttgatggcttgtttcagcttttgcagcatgttcagtctcgattctagctgtctcgtatgccccgccgaaaaataggctttgtgcttgctgacgatagaggggatgctgttcattcagtcgctccttttttgtaaggtatgatgattcattatgtaaaaaatcgcttctgcttgtcaaatgggggtttctaatgtacatgtagctgaaaagccagtaggcacataaaaaaagccccggacaggggcttttttaataaagagagggagcatcagcccattattctgacagcccaaaagaaaaaccccggaaacattgtcctcacaacatgtccggggtttaatccaatgctctttaaagagcgttttacttaacgggagtagaactcaacgataagcgcttcgttaatttccggagcaagctcagagcgctctggaagacgagtgaatgtaccttcaagcttttcagcgtcgaaagtaaggtactcaggaacgaagttgtttacttctacagattctttgatgatagaaaggtttcttgatttttcgcgaacaccgattgtttgaccaggttttacttggtaagacggaatgtcaacgcggcttccgtcaacaaggatgtgaccgtggttaactaattggcgagcttgacggcgagtgcgcgcaagaccgagcttgtacacaacgttatcaagacgtgcatctaaaagaatcatgaagttttcgccgtgtttaccagtcatttttgcagctttgtcaaacaatgtgcggaattgacgttcgtttacaccgtacatgtgacgaagtttttgcttttcttgcaattgcaaaccgtattctgatagttttttacgctgtcccggaccgtgggggcctggtgcgtaagggcgtttttctaattctttacctgtaccgctaagagagattcctaaacggcgagacagtttccaagatggacctgtatagcgagccataatgtgactcctcctttggttttattttgtggaaaataaaaaccgtctgttcgatccgaccgtgcacattttgttttcatgtatcctcgctccagcagcagagagttacacgatacaccttacagctaaggaacaaaatgcaaacacagaagctgaacaaaaaggctgcaatatttcacacaaagaacattatatgatttttccccgccgccgtcaaccatttctccatgaagagtgccggtttatgatataatgtacaaaaatgagtagtacatgtttaggtgataaaaatgaaaaaacaaacaattgatgaagtgacggcctttcatcagaaaatgctttcttttttcttaacgaaatctgaatccgtctcattatccgactcgctgttatggctggcctcagctctagaatcctgctttacatctctttcattgaccctttcaccggcagaatcaacacgtttcaccataaaaacagaagatgaaccgcattatgctccgctgaaagagagtgacggccgttttatgatcaggaatcagacgtccggcagatccttttatctgcgctcggaaggcgggctgccgatcccggaatcattgcctgagatcgttactcagtttattaatcaatctgtgagacaaagcgggctgtttgacaaaacgaagcatcagcggaaaattcacagaatgacagaaatgttccattcgcttttggaccaaaatgaggttttggaaaaactgcaggcaagtttgagtacagctttccggtctttccgtttttcactgtttatcacgcaggatcaggatacggacagacagcttcccgcaaaagaattacatatggacggaaaagatgccgatccgtctgcccagaaggtttatttatcggggagactgctcagaaaaggcaggtcatctgcttatctgccgatcaaaggccagcaggggacttacggggttctgaagacggaggggctgcaggatgccgttctttcgtgcagtactctcagtgaaatgctgctgcttgcgggcgcagcgggaaaagcatttgaaaatgcgcagctctatgagcaatcgaaaaaaagcattgcgaatctggagctcattaatgaaacatcgcgccagctgaatcagcgcctcagactcactgatacgatgcgggagctcgccgccattatgacccaatcgtttcatgcggaagaagtggctttttttcatattgatcattttgagacgcaaaatctgcttccgggacataccgctttttttaagacagaacgtgcgaacccctatatcagcattgtgaaagaaaagctcttcgagggagaaaagggcgtgtttatcggcagcggaaagactgtattcggcgaaaacggtttcggctcgctgatggcggtgccgatgatcgaaaatgacaccgtcttcgggttcgcgattttattgaaaaaggatttgtatgcttttacttttgaaatgtataagctttttcaagcgctcattcaccatgcgacattggcggtcacgaactccatgctgcgcgacaggcttgagcatcttgttcagacagaccagctgacggagctgtattcaagaacctatctggatgagaaaattcaatacagcatgaaaattcataaacggggtgtattcatcctcgttgatatcgataatttcaaaaatattaatgatacatacggtcatcaaacgggagattcgatcctgattcaggtggcctccgttatgaagaaccatattcgtgagcatgatgtcgctgcgaggtgggggggcgaggagctggctgtctatctgccgaatatcaacgtgtcatccggagaacgcatcgctaaaaggctggttcgcgccatccgggaaaacaccgagccgcgcgtgacgatttcctgcggcgtttcctgctggtcaaagaccggcccgatgccgttgaaattgctcgttcagcaagcggatgaggcgctttatatcgccaaacggaacggcaaaaaccggctgatcatccatcaaaacagcacgacgacataaaaaaggagccggcctgccggccgggctcctttttttatcctaatcgtttttcaagcgtttcaacaaactttgctaaataggtttcgtccgtttcatcaaaacggtttttcacggggctgtcaatgtccagcacaccgatcacttcaccgtttacgcggatcgggaggacaatttctgactgggaagccgcgtcacaggcgatatgtcccgggaacgcattcacatcggcaatccgctgcacgtcgccattagagtaggcagtgccgcatacgcctctgccgaacggaatgcgcacacaggcaggaagtccttgaaacggtccgagcacgagctcgccctctttagcgaagtaaaaccccgcccagttgacttcatgtaatgaatggtataaaagcgctgacgcattcgcgtaatttgcgatcgcatccgtttcatcttctgtcatggcttcgagctgtttaagcagaagctgataacttttttctttatctccggaatgtttttcgacatgaaacatggaaaaccctcactttttctataatatcaaacaaagttccggccgttctgccggcatttgtcgagaagttcttacaggaacggcgcctttctgcttgaattgttacacataaaggggtgagccgtatgaaagtaagcaccaaagacaaaattattaacgccgctgtccagctgtttaaccaaaaaggttattccggcacgtccgtccgtgaaatcgcaaagtcagctgatgtaaatgttgcgcacatctcctactattttaaagggaaaggcggattaatggaacatttagtttccgagttttacgaaggctatactgaagcgctggaaaaagccgccgtcagtatgaacggtgaagacgcgcaggaacgcatcctgcgggtgattttcgatattttatcctatcagcacgataaccgtcaattaacgcggtttgtgtaccgggaagtgacgattgattccgtgcttatcagggaaattatgtctacttacttaatgaaagaaaaatatattttccagctggtgattgaagaagggcagtcacgccacagacggctgacgctgcccgtgccgcattttattctgcaattgaaatccctcttgatgatgccgtatcttcagccccaatacattacggaggtgctctatatgcagcctcatgaaccgtacttttataaaaggtattttgaagaggtgaagatctggatcgaaagcgtgttccgacggcctgatgcggcgcttatgaagtaatgatgcttttgtacgtttcgtaggaactgccgacatcttccgcttgatgggcgtccgacccgaatatgagcgggatttttttttgcttcgccgtctcagccatccaatcctccatgtatacttccccggcaaatttctttctgagcccggatgtattcacatccagctccattccgtgttctttcacggcgtcaagacagcgggccgcaagctctcttatttgaggtgacatgctgtaagggaaaaggcgcgcaaattttttgacgagcgtgatatggccgacccgttttggcttaaaggggccgagcggtgttacaatggaagaatacacagtttcatagtattgttcatatacggcttcaacgcttccgaagcggtcggcaagctgctgaaaggcgtgctcgtcaaaatccaggcatatataagacggaccggtcttcaaaaaatgaacggataaaatgccgtcatccagtgaggggccgtacgtgttcagaaacgccgcggtttcctcttcataccctgtgataaaatcggtttccagcccagtcagaatgctgatttgtccatcgtattcctttttcaggtgtgacagccgttccaaataaacctccatctgtctgagatccatcgcgctgtcctgaagcggtacgggatcttgaaatgacggaggaaggggggcgtgctctgtaaatgtgatcgagtcaaagcctctttccagggccttttcgacatattgtttcagcgcatccttcgagccgtgagggcaaaaaggcgtgtggatatgagcgtctcgtttttccatttgtgtcactccattaaaaaattgcagaatcctgccgaaattatgcaaaaagtttttgatttctggtcaaaaaatgttggttacatggtatcataataacaatgaaaacgacagattttctcaatacatatattgaaatctttctgaatacataaaacaccctgacagattaagagaacaacaagggggctcattatggagttagtcatcggattattggttatactgctcgcgctctttgcggcgggctactttttcaggaaaaaaatttatacggaaattgaccggctggagtcatggaagattgaaattttaaaccgttcgatagtggaagaaatgtccaagatcaaacatctgaaaatgaccggagagacggaagagttctttgaaagatggcgcgaagagtgggatgaaattgtcacagcccatctgccgaaagtggaagagctcctttatgatgccgaagagaacgccgacaaataccggtttaaaaaagcgaatcaggtgcttgtccacatcgacgaccttctcactgcagccgaatcaaatatagaaggcatactgcgtgagatcagcgaccttgtgacgagcgaggaaaaaagccgcggagagattgaacaggtgcgtgagcggtattcaaaagcgcgaaaaaaccttctggcgtacagccatctctacggagagctttataacagcctggagacggatctcgacgaaatctggagcggcataaaagagttcgaagaagagacggaaagcggcaattacatcaaagcgagaaaagtgctgcttgaacaggaccgcagactggatcagcttcagacatacatagatgacgttccgaaactgcttgcggactgtaaacagaccgtgccgaaccaaattgccaagctgaaagacggctaccgggaaatgacggaaaaaggctacaaattggagcatattcaaatcgaaaaagagctggatacactcacaaatcaattgaaacgggccgaaaacgcgcttttggaagaattggatgttgacgaagcgtccgccattcttcagctgattgatgaaaccattcaatcgatgtatgaccagctggaaggcgaagtggaagccggacagtccgtattaagcaaaatgcctgagctgatcatcgcgtatgagaagcttgaggaagaaaaagaccgcacaaaaaccgaaacggagctcgtcaaggaaagctatcagctgacggcgggtgaaatcggcagacagcatgccttcgaaaaacagctggaaacgatcggccggctccttgagcaggcgagagaaaagcttgatggtgagcatgtcgcttactctctattgattgaagaagtcgaggccatcgaaaagcagatggaagaggctcagaaagaacatgccgaataccgtgaaaatctgcaggcgctcagaaaagaagaactgcaggcgcgggaaacgctgatgcatcttcggaaaaccatttctgacacggcccgaatgctgcaaaaaagcaacgtgccgggaattcctgaacaagtcaaggacaagctcgagacggcaaatcatcatatagaagaaaccgtcagccaattggaagagctgccgctgaacatggaggaagccgccaaacatctggctgaagccgaaaaggcggttgaggaagtcagcgaagaggcggaagaccttgtgattcaggtgaagctgattgagcggatcatccagtacggcaaccgcttccgaagccagaatcatattttatccgaacagctgaaagaagcggaacggctgttttacgcttacagctataatgaagcttatgagatggcggcagatgctgttgaaaaagcagctcccggcgccgtgaaaaaaattaaagctgatcaatctgcttcatagacgcacaagcaaaaactgcaccctgatggaaatcagaggtgcagttttttagtttctcacggaatataaaaagcgcctgcggctgatatacgtcaagccgcaagcgctgaatgttacgattttgctttatttaattcgatgggcgggctggtaaaaaacgtgatgatgcagccgatgatcgctccggcaatgcccggaagcacccagccgattcccatgctgtaaagcggaagatttgcgtttaagaatgaatctaatgatccgagcggaatgcctgctgccttcaaaccgtccaagatactgaacagccccgttccgatcaggcaggcgatatagacttcccgtctttccttaaagattttatcaataaaggaaaggacgataatgacaatcgccagcgggtaaatcgctgataaaataggaactgaaaatgcaataatctcagcaagtccgaaatttgaaatcgccagactgaacagcgtgacaatcgtaaccaccattttgtatgataaagcgggaatcaattttgaaaaatattcgccgcaagatgtgacaagcccgatgcttgtcgttaaacacgcaacggtgatggcagagccgagaacgatgtttcccagtgaaccgaacaggtaatctgatgaagctgataaaatctttgcgccttcgccgagcggccccacagcgtccgtgcttgtcgctcccaaataggccaaagataaataaatgaatgtcaaacctgccgctgcaatcagacccgctttaatacaagcggcggcgagcgctttacgctgggtgacgcccctgcttttaacagcgttgacgacaacgacgccgaagacgattgaggcgagcgcgtccattgttttatagccttccaaaaatcctttgaacaccggcgttccggaatatgcctgatgtacggcgcccagtccgcccatcggagtgacaatggcttttacgacgatgattaaaataataccgaatttaataggagtcaaaatctttccgactctgtcaacgattttggaaggattaagagctaaataatacgtgatagaaaaaaagatcaacgtgaaaacaaacaaagataatctttccggaatgccgcttaaaaacggaactgcaccgatttcatatgaaacggttccggttctcggaatcgcgaaaagcggcccgattgataaataaagcacaacggtgaaaatagtcccgaataccggatgagctttatcggcaagcccttttgcgtctttgcccgttaatgcgatggcgataatacccaaaagcggcagacctacgccggtcagtaagaaaccgcccatcgctttccagacattatgccccgccgcttgcccgagctccggcggatatatcatatttcctgccccgaaaaaaagtgcgaaaagcatgaaaccgataataacggtatctttgacaggtagtgagtgtttcataaaaatcctcctaaatactatgttgaaatattctgtcaattaattgtcagataatataacaaaacgaacattacttattatatggcaatgtacagagaagtcaatactcgatttattgcgaatttatatttacttttgttatggtagcataaatatcatacgatgtaccgttttcattaaaggagtaaaaaaaatgatatatttagacaacagctcaacgaccgagccgtatgaagaggttttggaagtgtataaacagacgagcagccgttatttcggcaacccttcgtctctgcaccagttaggaactgagacggaacagctccttgaagcggccgctcagcaaataaaaaaaaccttacgtttaaaaaattatgatattgtatttacatcaggcgcgactgaagcgaataacgcggcgttaaagggagcagcctgggcaaacatgagtaaaggaagacatatcattgcttcggcgattgagcatccttctgtgacggagacgcttgatcagctgacagagctgttcggctttgaagtcacatatcttccggccgatcaaaacggcttcgtttctttgaaagacgtcaaatcggctatcaggccggatacgataatcgtcagcgtcatgcatgtcaataacgaagtcggctccattcagcccgtaaaggaaatcggcgggtttttgaagcagcaccggaatattctgtttcatgttgatcatgtgcagggtattcataaagttcctctgtctatagaagaagcgggcattgacctttgcaccgtttcagggcataagtttcacggcttaaaagggaccggagcgcttatcgtcaaaaaaggaacgcggctcattccgcttataacgggcggctcgcagcaaaaaggcgtccgcgccggaacagaacacacggcaggcgccgtttcccttgcgaaagcgatcaatctttccgcgcgtgacatgaacgagcggctttcttctgtggaggctgccaagaatgcgctcatggaaaggctgagcgggacggacggggtcgtcatcaatactcccgccgaaaacagcgcgccgcatatcattaatttttccgttccgggcgtgaaggcggaagtgctgctgcacatgcttgaggaaaaaggaatatatgtctccacaaccgcggcatgttccgcaagagagcacaaaccgagccgtgttcttctgcaaatgaataaaggcgaacagattgcatcaagcagcatcagagtcagcctgaacttcagccatacggctgacatcacggagccgtttatggccgcgctggcgccggctgttcaaaaactaaaaaaaatgatgaggtagcatatgaattacgatcatattttaatccgttttggtgaaatatccacaaaaggaaaaaacagacgcagttttattgaaagattaaaacagaatatccgcctggtattaaaggattataaaaaagtaaaatacttttcaaaccgggaccggatgtcaattacacttaatggagaaaacccggaggaaatttgttccttattaaagaatatattcggcattcaaagctttagtctcgcaattaaatgcgaaagcaagctggaagacattaaaaaaacggctttagctgcgatagaaggcgaatataaaccggggaatacgtttaaggtcgagaccaaacgggcttacaagcagtttgaattagatacgaatgcgatgaacgctgaaatcggcggccatattttgaaaaacacggatggattaaccgtcgatgtgaaaaatccggatattccgcttcggattgaaatcagggaggaagcgacattcctgactattcgtaacgaaaaaggcgccggaggccttcctgtcggttccgcgggtaaagcgatgctgatgctttccggcggttttgacagtccggtcgccggtttttacgcgatgaaacggggattatcagttgaagccgtacatttcttcagtccgccgtatacgagtgaacgtgcaaagcagaaagtcatggatcttgcgggatgcctcgcaaagttcggcggcagtatgacgcttcatatcgtgccgtttacaaagacgcaggaactcatccaaaaacaaattccggagaactatacgatgacggcgacgcggcgtcttatgctgcaaatcgcggacagagtcagagaagaacgaaaagcgctcgcgatcattacgggagaaagcctcgggcaggtagcgagccagacgcttgaaagcatgtatgcgatcaatgccgtgacggcaacgccggttttgcgccctttaatcggaatggacaaaacagaaatcatcgagaaatcaaaagaaatcggcacttatgaaacaagcattcagccgtttgaggactgctgcaccatctttacgccgccaagtccgaaaacacgcccgaaaaaagaaaaaatcgagcacttcgaaagcttcgttgattttgaaccgctgattgcagaggccgctgccggcatcgaaaccatcactgtttactcagagcaggaagctcacgataagtttgccggcctgttttaaaactgtatacaattaccaaagtttttttgaatgaagacatgtgttttatcacattctatactcacaaggaggtgatacacatgtcacaacaatcaaacagcggaaacagcaaccagcttttagtgccaggcgctgctcaagctatcgaccaaatgaagtatgaaatcgcttctgaattcggtgtaaaccttggaccggaaacaacttctcgcgctaacggttctgtcggtggagaaatcacaaaacgtcttgtctcttttgctcagcaaagcatgggcggaagcagccagcaacagttttaatcacaacttcacataatggctaagagagcggggaattccccgctcttttttcatgagtatagatagaaggcgggaagcaatttatgcatatttttattgtaatggcctatgtttatgtataatggggaaagaaagtgaggagttgttcgtgttaaaacgagaagatttaatcgccccaaagaactataaccttgtaaatgaaatcgaaaagttcagccgttccaaagagaagaacgcgcttatatgggaagatcaaacaggcggcaagaaagtctggacatatgaaaaattgatggaagaaacgaataaaatcggagcccgtctgaaaggtctcggatttgaaaaaggcgataagctgattgtcatggttccgagagtgcttgaagcgtatgccgtttatttagcgatcttaaaagcggggatggtcgtcattccttgctcggaaatgctgcgcgccaaagaccttgaatatcggatcaaacacgccgaagtgaaaggcgctatcgtttatccttcatttataaacgcgtttgacgaggtgaataccgagcagctggtgacattgtcaatcggtgaaaataatgtcggctggaaaaacctcctaacgattgaagcggacggggacagttttcaaacagctgatacaacaagagaagacatggcgtttttgtcctatacttcaggcacgaccggccagcctaaaggcgttgtacatacacacggctgggcctttgcccatttaaaaacatcagccggtgcatggctggatatttctgaagacgatacagtgtgggccaccgcggcgcccggctggcagaaatgggtgtggagcccgctgctcgcaattctgggaagcggcgcgacaggtgtcatttatcacggcagattcaacgccaagacgtatttagagctgctggagcgccatcaagtaaatgtcttctgctgtaccccgacggaataccgcctgatggcaaaagtggaggagttggacaaatatgatctttctgcccttcacagcgcagtttctgcgggtgagccattaaaccgggaagtcattgacgtattccggaagcatttcggtattaaagtgagagacggatacggccaaacggagagcaccctgttagtcggcgtcctgaaggatatggatattaagccgggaagcatgggcaaaccgacccccggaaatcaagtggagattataaacgataaaggcgaaatatgcgaaactggcgaaacgggcgatatcgccgtgcatttgagcacaccggccttattcaaggaatattataaagatcctgaaagaacgaaaaagcagattcgcggagattactttcttacaggagaccgcgcgaaaaaagacgaggacggctacttttggtttgagagccgcaatgatgacatcatcgtcagctccggatatacaatcgggccttttgaagtagaggacgcgctcgtgaagcatccggaagtgaaagaatgtgccgtcgtggcgagcccggatgaaatcagaggttcaatcgtaaaagcttatgtcgttttacaagacgatgaaaagcgcagtgacgaacttgtcaaagaactgcaaaaccacgtaaaaacgattacggcgccttacaaatatccgagagaaattgagtttgtcgaaagcctgccgaaaacggcgtccgcaaaaatcagacgtgtggagctgagacagcgtgaagaacggctgaaggctgataaaaaagcataatacggaataaagggtgagcggggatgaaagcgatttggcacaacggcaccatctatacaatgctggacaagaatcatgtcactgaagccgtttataccgaagaaggcgtcgtcaggcagacgggcagcttccgggagctccaaggaacatacggttcgcctgatacggaggaaatcgatttacatggagctgtcatgttcccggggtttacggacagtcatatgcatttaatcggacacggggaaaaacagcttcgcctcgatttgtcgcagctgacgtcaaaagaagcgatactgcgggccgcaaaagaagcagagcgtgaattggaagatggcgaatggctgatcggcgaaggctgggatgaaaatctgtttgaacggccggtttacgtcacgaagcatgaccttgacccgctctttcccgaccgccccgtcctgctgaagcgggtatgcaggcacgccgccgcggttaattcagccgcattgcgcgcggcgggaattacaaacgaaacacctgatccaaacggcgggattatcgtccgggacggcaccggtccgacaggccttctgctggataaagcccaagagcttgtgacacaggccctgccgcccgtctcacttcactatgtcaaacgcgcgcttcaaacggcgattacggactgctggtcaaaaggcctgaccggcgggcattcagaagatctggcatactacggagacgcgtccgttcccgttgccgcgtacgagtcattaaccggcagcggcctttatccttttcgcgcccatctgctcgttcatcacgaagccgtcgacagctggagcgctctggataaatcgaccggaccttatctggaatacggagcgatgaaaatcttcgcagacggcgcgctcggcggcagaaccgctctattgaaaaagccttatcgcgatgatccgtcagtttccggcgttcaggtgcatgatgacgaaacccttgccgctcttgtttataaagcgagagagaaagggatggagatcgccgtgcacgcgattggcgaccttgcatttgaaaaggtgctggatgttatcgaaagatacccggcaaagcccggacagctagacaggctcattcatgcgcaagtattagatgacggattgattgaaagagccgcccggctgccgatcggacttgatcttcagccgcattttgtggccagtgattttccgtgggtgattgacaggctcggagaagagcggatgaaaacggctttcgcctggaaaacactgctgtcaaaagggctgctgtgcgccggaggttcagatgccccgatagaaccggccgatccgcttctgggcattcaatcggctgtgctccgtacgagcaagcagcacccggaaggtccggcctattatgaaaaagagtgcctgaccgtgtacgaagccattcagctttacacggagggaagcgcggccatcatccataaagaacatagccgcggacggatcgcccccggctgtgatgcagactttaccgtactcagcggtgatccgttcaggacggacccgaaaaagcttcatgaattggaagctgtcaaaaccgtcgtcggcggccgtatcgtatatgaaaaagaggacaggcagtgatgcccgtcctctttttttatgataaaaatgatcgttttactttttcccagaaagagttgtctttcagtttcaccgttttaatttttttatcggatagtctaatctcaacctttttgacattccgcgtgctgagcgcttcattatcaagcccgataatcggatgctcattgccgtcttgcaccacctgcagtgtcagcttccggtctgagcttaaaataaacggagatccgagtgtacggtatgtgttgttgttcaacgacgccagttcggatacctgcatgcaggaaatcaaaggatcaacaacggcgcctgaaacagatttattgtaggcggtgctgcccgtcggggtggaaatgatcatcccgtctcctctgaatgtctcaaaatgaagatcatcaattaacacatccatcacaaacgttttaataatgcttgaacggatggaaacctcgtttaaacagtgaaaatgattgctgccgtccaccgtgacgtgaatgagcgggtattttctgacctcaagctgttccgcggtcatgctggccgccattttttcaggctcatcgctgtgaaaatcacagtacaaatgggctttcccttttttagcgatgccgacatacaggcagtcatcacggaatccggtttttctgacggcttgcagaaatgagccgtcgctgccgatgctggcgataattccggcattctccggttgagccgcaactgtaaaaccgtgcgattcagcaagctgcttcaaagagctgacttgttcttttgtttcgttattttgtttgtggaaaaaataaacattgcggcgaagatcggtcatatccccattcccctttgctgtcatatttacgtttttctcccagcaggtattgtgttaaaatacctgtggcaatagtgtaacatgtttcctgtttatccgttaagggaaagcgcttcatgaaaaaaatgaatctttttttacgggggaacgtacgaatattgacagaaaaggaggagaacaaatgaatgcaaaaagatggattgcgctcgtcatcgcgctcggcattttcggcgtatcagtcattgcaagtgtgaccgtcggggtgctgaagaatatcggagatacagggtctgactttgcatcactgacagatgacacagaagaagtgacactggataagggcagccccggcagtaaaatcgccgtgcttgaagtggacggcacgattgaggataacggcgggtccgctggcctgctcagctcaggcgggtatgatcacagatcatttttaaaacaggttgagcgtgcgaaagaagataaaagcgtcaaaggaattgtactgaaaatcaattcccctggcggaggcgtgtacgaaagcgcggaaatacataaaaaactggaagaactaaagaaagaaacgaagaaaccgatttatgtatccatgggctccatggcggcatcgggaggctactatatttcaacggccgccgataaaatctatgcttcaccggaaacgctcacgggttcactgggcgtcatcatggaaagcgtcaattattccaagctcgccgatgaactcggcatcaagtttgaaaccattaaaagcggcgcgcataaagacatcatgtccccgacccgcgacatgacgaaggaagaaagaaagatcatgcagacaatggtcaacgattcttatgaaggatttgtcaatgtcatttcaaaaggccggcacatgtcaaaagcggatgtgaaaaaaattgccgacggccgtgtttacgacggcagacaagcgaaaaaaatcggcctcgttgatgagctcggtttttacgatgatacgatcagcgcgatgaaaaaggaccataaaaatatgaaaaacgcttcagtcatcacatacgaggaaggattcggattaggctcgcttttttccatgagcgcagcgaaaatgtttaaaagcgaagttgattttctgaatatgaaagaactcatttcgcaatccggttcgccgcggatgatgtatctctatgcaaagtagggggggagaaagaatggacgcgacttacgaaggctttcacggcaaagaagagggagccgaacaacagagggcgcccgagcaggcatatgcgggcttttggatcaggttttgggcgtttcttctcgattggctggtggtctggggacttaaccatctcatcgtttcaccggttttcacgctgatgaagctcccggcaacaagcggaatgtttacaatctcagcttattccgtcacaaccctgatcgtctacctcgcctattttgtgttcatgacgaagtggtttcatcagacactcggcaagatggtcttcgggttaaaggtcacttctttgacgcccggaaagcctcttacttggagcaccgtcattttcagagaagcggtggggcgttatatcgataaaatctggattctctatatcgtcattgcgtttacgcccaaaaagcagggcattcacgatctgatcgccgacacaacggtgattcacgaagcgctgtaccgcaaataaaagcaataaacccggaataaacgtccgggtttattttttttggttttggcgataatgctgctaaggaagtgaagcttatgggatatgccgcagcagctgttattctcattctcattttggcctggctgcttatgaggatgaaaattcacctgacgctcgaatatcttcacgataaagataacgacaaactgacgtttaaactctcggccttatacgggctgatccgtattaaaaaaacgctgcccgtcattaaagtaaacagcgaagacgcgtcaattgatgtcaaacaggacacgaaatcagaaatgaaaggtcagaaaaaagagaagaaaaaaatcacatatgaagatgtcaaacagagcattcacagaatagaaatgattctgcaccaagtctttcagatgcgccaaatcggtgcctcatttcttgcgggagtccgtgttacgaagttcgaatgggtgacggttatcggaataaaggacgccgccgttacgggaatcgccgccggcggattgtgggccgtaaagggaggccttacggcgatgctgtatgatcatctgcgtttcatacataaaccggtgtgcgaagtcattccgtcttttcaagtgcctgcatccaagacgcatttgcagtgtatattcttttttcgttttggacatcttataggtgcagctttcaaattgctcaaatacgggcggaacggactttctatcatacgaaagaaacagccggttccggttgcttcaaagaatgattcatcagtttaaggaggagcgcatatggcagaccatcccattcaaggtttaatgaaaaccgctatggaaaatttaaaagaaatgattgacgtgaatacaatcatcggcgatcctgttgaaacgcctgacggcagcgtaatcttaacggtttcaaaggtcggattcggatttgcggcgggcggaagcgagtttggaggaaagccggctgaaaaaagaaccgatgatgatgaaagaaaagagcagaagctcccgttcggcggcggaagcggcggcggagtatccattacgccgattgcgtttctgattgtcggaacaaacggggtgcgtatgcttcatttagacgaaaacacccatctgattgataaactgttagactccgcgcctcaaacgattgaacgcatccagcatatgtttaaaaagaatgaaaaaggccggaaccaaaaaagaacggatatcgatttataacagaaaagttaactgccgcccgcagttagctttttttacgatgcggcataacctttgcagtttgcataaaactcgactatgatagagctatacatagataaagggaggaatcagaatggctgaaattacatttaaaggcggagccgtgacgctgatcggacaagaagtgaaaccgggtgaccaagctcctgacttcacggttttgacaaacggattagaagagaagacattagcagatatgaaagggaaagtaacgatcatatccgttattccttccattgacacaggcgtatgtgacgcgcagacacgccgcttcaacgaagaagccgcaaaactcggtgatgtgaacgtttatactatcagcgccgaccttccttttgcacaagcgcgctggtgcggagcgaacggaattgataaagttgaaacattatcggatcataaagagatgtcatttggtgaagcattcggtgttcacatcaaagaacttcgtcttttggcgcgttccgtattcgtccttgatcaggacggaaaagtcgtttacgcggaatacgtaagcgaagcgacaaaccacccgaattatgaaaagcctatcgaagctgcaaaagcgttaatcaagtaaagagagaaaaagagctccgggtgctgccgcggagctcttttcatggcaaggaggaaacagcatgcaacacgaccatgtcggtcagatttatgaacttttagatgaagccgcccaagtgatagcagaaggtcttcagatttcttatattgaggggcttgcggaagcgggagagatgtattttcttgaaaaggccgaccagcttccgcttcaggaaaagcaaaccggcgagcttaacagcctgcttgcgaaagcagacttcagaaaatgggagcatgaatggatccgcaaggcgttccagctcgccattttaaaaggactcaaagataagtcccatccgaacagacagatgacgcctgatacgatcggccttttcattagttacctcgtgaataaatttacgggcggccgaaaaggcctgacattgatggaccccgcctgcggcaccggaaatcttctgctgaccgcggcaaaccagctttctgacaaagcgggaaaaagcttcggcattgaaatcgacgatgtccttctgaagatcgcttatgctcaggcgaatctgcaggaaaaagaaatggagctgttctgccaggacagtcttcagccgttatttatcgaaccggccgatgcggtcatctgcgatttgccggtcggctactatccgaatgacgaaggcgctgaagcgtttgagctgaaagcggatgaaggccactcttttgctcaccacttatttattgagcagagcgtcaaacatacaaaaccgggcggatacttattttttatgattccgaaccatctgtttgacagcgcgcaaagcgataaactgaagcggttttttgcggaaaaagtgtatatcaacgcccttcttcagctgccggctactatgtttaaaaacgaagcgcaggcaaagagcattttaatcttgcagaaaaaaggtgaagacgcaaagccgccgaaacaagcgcttttggcgaatcttccttcttttgcgaaccagcaggcgatgcgggagatgatggcaaaattggatcaatggattcaaacagaaaaataatggcgaaaaagcagtgcgagatgcaaaaacccgcgctgcttttgctttttaaaatgaatggaaatcaggaggataacacaaattaaggaaagaaaataacattccgtaaggccgtgccgtccatttggcacaaataaaatttatcagaaaatatcgacttcatattgtaagcggtgccaatatggatgttgacttgaaatgctgagttgacaatgtttaaatggaaaagtcagatattttttggactgcagttatggtctgggaaaaaagaacgaacaaacgaagaagaattttgataggagcgtcatttatgtctaaaattattgcaattaacgcaggaagctcatctttaaaatttcagttattcgaaatgccttcagaaaaggtgctaacaaaaggtttagtagaacggatcggtatcgccgacagcgttttcacaatctctgttaacggcgaaaaaaatacagaagtgacagatattccggatcatgcggttgcggtgaagatgctgcttcacaagctgactgaattcggtattataaaggatttaaatgaaattgacggaatcggccaccgtgtggttcacggcggagaaaaattcagcgattctgttttgcttacggatgaaacaatccgtgagattgaagagatttcagaacttgcgccgcttcacaacccggctaacatcgtcggcattaaagcctttaaagaagtgcttccggatgtgcctgcggttgcagtgtttgatacggcgttccaccaaacgatgcctgagcaatcttacctgtacagccttccgtacgaatactacgagaaatacggcatccgcaaatacggtttccacggcacatctcataaatacgtgacacagcgcgcagctgagcttctcggccgtccgattgaagacttgcgtctgatttcctgccacctcggtaacggcgcaagtatcgcggccgtagaaggcggaaaatccattgatacgtcaatgggcttcacaccgcttgcgggtgttgcgatgggaacacgttcaggaaacatcgaccctgcattgattccgtacattatggaaaaaacggatcagacggcagatgaagtattaaatacgttaaataaaaagagcggactgcttggcgtatccggtttctccagcgaccttcgcgatatcgtggaagcttcaaaagaaggaaacgaaagagcggaaacggctcttgaagtgttcgcaagcagaatccataaatacatcggttcttacgctgcgagaatgagcggcgttgacgcgattattttcactgcgggtatcggtgaaaacagcgttgaagtcagagaacgcgtgcttcgcggcttagaattcatgggtgtatattgggatcctgcgctgaacaacgtgcgcggcgaggaagcgtttatcagctaccctcactctcctgtcaaagtcatgatcattccgactgacgaagaggtcatgatcgcacgcgacgttgtccgccttgcacagtaatgatcgaaaaaagcacatcctttagggtgtgcttttttattgaatgccccagaatcaaacgttacgatatgtttaatacataaacgatgaggtgaagcaatgagtgtgcatgaacataaacaagaagccccgtcagccgtgcgctgcaaggtgattacagtcagcgacacgagaacgaaagaaaccgacaaaagcgggcgcgtcatgatggagttcctcagggaagcgggatttgaaacggtcgcttatgacattgttaaagatgaaaaagatgaattgcagaaagccgttttatccggctgtatggatgaatatacagatgcggtgctgttaaacggagggacgggcattgccgaaagggatgtcacaattgaagcggtcacgccgctgttttcaaaagaactcccgggattcggcgagctgttccgcatgctgagctatacggaggacatcggttccgccgccattttgtccagagcggcagcgggtgtaatccaaaataccgcagtcttctgcacgcccggctccacaggcgccgtaaagcttgcgatgagtaaactgattattcctgaactgcctcatgtgctccgggaaatccgaaaagatttataaatgtataaaaaggctctgctccgctcaaaaaattgggtggggttttttttataaaaggcttgaaaaaacagaatttacttgttacagtgtatacatacaaaatgcatttttattaattaaaactaatttttatacaaaagggagcttttaacatggcagaacaaaaaaaggttgtattggcatactcaggaggtcttgatacttctgtagcgataaaatggctgcaagaacagggatacgatgttgttgcctgctgcttagacgtaggggaaggaaaggatttggcattcgttcagcaaaaagcgctggaagtaggcgccgtaaattcctatgtgattgatgcgaaagaagaattcgcccgggagtacgcgctcatttctatgcaggcccatacaatgtatgaaggcaagtatccgctcgtatctgcattatcccgtccattaatcgcgaaaaaactcgttgaagtcgcggaaaaggaaaacgcggtggccgtagcgcacggctgcacgggaaaaggcaacgatcaggttcgtttcgaagtatccattaaatcattaaatcctgatctggaggtcattgctccggtccgtgagtggcaatggtcgcgtgaagaagaaattgaatatgccgcaagccgaggcattccgattccgatcaatcttgacagcccttattctatcgaccagaacctatggggacgcgccaacgaatgcggtatattagaagacccgtgggcggcgccgcctgaaggggcatatgacctgacagcatctcttgaaaacacgccggacgttccggaaatcatcgaaatcgcatttgaagccggtgttccggtttcaatcgacggcgtaacctacccgctcgctgatttaattctcaagctgaacgagactgccggaaaacacggcatcggccggattgaccatgtggagaaccgcctggtcggcattaagtcccgtgaagtttacgagtgcccgggcgcgatgactttgattacggctcacaaagagcttgaggatctgactttagtgaaagaagtggcccatttcaaaccggcaattgaacaaaaactgtctgaaatcatctataacggtttatggttctcgccgttaaaagacgcgctgcttgcattcttgaaagaaactcaaaaacacgtcaccggcgtcgtgcgcgtcaagctgtttaaaggccatgccattgtagaaggacgtaagtcggaatattcactctatgatgaaaaacttgcgacatatacaaaagacgatgcttttgaccatcacgcggcaatcggtttcattgagctttgggggctgccgacaaaagtaaacagcattgtgaaaaagaaggagcagattgaagcatgaagaagctttggggaggccgttttcaaaaaacaccggaaaagtgggtcgatgagttcggcgcatccatcacattcgaccaaaacttagtcaaagaggatattacagggtctctcgctcatgcggcaatgctgaaaaaatgcggcattctgacggaagaagaagaaggcgccatccgacaggggctgcagatcctcctgcaaaaagcagaggaaggaacgcttgaattctctgttgattatgaagatatccatttgaatattgaaaaaatgctgatcgaagaaatcggaccgctgggcggcaagctccataccggcagaagccggaatgaccaggtggcgaccgacatgcatttgtatttgaaagatcatgtctcacatatcatcgtgctgattgaacagttccaaaaagcgctgattgaaaaagcggaggccaatgtcgagaccattctgccggggtacacccatttacagcgggctcagccgatttctttcgcccaccatctgcttgcttatttttggatgcttgaacgggataaagagcgttttcgcgatgctatgaagcggattaacatatcgccgctcggatgcggggcgcttgccggaaccacgtttccgatagaccgtaactattcggcggagctgctcggttttgactccatttatgagaacagtcttgacggagtcagtgacagagattttattctcgagtttttaagcggcagcagcatgctgatgatgcacctttcgcgtttatcagaagaaatcattctatggtgctcgcaggaattcagattcattgaactggatgatacgtatgcgacgggaagcagcatgatgccgcagaagaaaaaccccgacatggcggagctgatccgcggtaaaaccggacgcgtatacggtgatatgatggggcttttcacgattatgaaagggctcccgctcgcttacaacaaagacctgcaggaagataaagaaggcatgtttgacacggtgaaaaccgttgaaggaagccttcagattttcacgggcatgattgaaacgatgaaagtaaacaaagacattatgaaacaagcgacaaaacaagatttttcaaacgcgacggaacttgccgattatttagctaaaaaaggcatgccgttcagagaagcgcatgaattggtcggcaagcttgtgtacagctgcattgaaaaaggaatctatttaagtgatatggcatttgaagaattccttcaagccagcagtctctttgaaaaagacatctataccgtgctcgatccgcatcatgcggttgaaaaaagaatgagcgccggcggaacgggttttcagcaggtagaacaggcgctcgtaaaagcaaaagcctgcgccggcatttaatttgctgaaatttccttcatattttcccgtcatatcagacaccctacatctataaagatgggaggtagaaggaatgcgcaaagaacaagaccgttacatctatgatgaaaaagaaagtgaagaaacggccaggctcatctcagaggcatacgaaagcggttatgtcggcatggaggaagcctctgctccttcagaaaattaagctgtctgtaaagacggcttttttttcgtgcggacgaagtgcaaaaaagtgatattgccgtttgtttatagtaaagtagagggagaaacgtcttgattttattgaagcggcaacgttgcctggggagggtattcaatgtgcgacatgctctaatcactgccggtacaaagggattgggccgaaaagtgactgaaatgcttctggaaaaaggcttttctgtcacagtgaattacagacaagacgaagaagcggtcgcctgtctgaaggcggattatcccgggtgccatgacagattgcaattcgttaagggcgatgtaacccggaaagaagatctcatgcggatcgccgatgcagcccttcagcggtttggaaggattgacatactgattaacaatgccgggccgtacatatttgagcgcaaaaagcttgccgattattccgatgacgaatggtatgacatgcttgaagggaatttaagcgccgttttccatctgtttaaagcggttatcccggtcatgagacagcagcggttcggcaggattattacatacggttttcaaggagcggaccatgcccccggctggcttcaccgttccgctttcggagcggctaaagtcggattggcttcgttaacgaaaaccattgcgattgaagaagctgaatcaggcattacggccaatatggtctgtccgggtgatattgtaggagatatgaaagaagcgtctatagaggaagcaagacggaaaatcggcaaagaaaagacgccgatcggcaggtccggaaccggagaggatattgcgagaatcatcgcctttttatgtgaagaagattccgatcttgtaaccggaacggtcattgaagcaacaggcgggctgaatgtgattaacaggcatcaatccctgtaagttttttcgtttgtcaaaaagggaacttgataaatattaattttttatgaggtgaaaacaatgaaagtgacttatcacggacattctgtcattcaagtggaaacgaaaacccataacattatttttgatccgtttctgaccggaaacagtctgacaaatttgaaaccggaagaagtgaaagcggatgtcatcctgcttactcacggacacaatgaccatgtcggagatacagagcagatcgccaaacaaaacgatgcgctcgtcattgcgccgaacgagctggccgtttatctcggctttaaaggtttaaaggtccacccgatgcatatcggcggggcgcgccaatttgatttcggcaaagtgaaactgacacaggcattccacggatcggcggtcactgatgaagaaaacaaaaccattacgtacacggggatgccggccgggattttattgacgattgacggcaaaacgattttccacgccggggacacggcgctgttctcagatatgaaactgatcggggaactgaatcacattgacctggcgtttctgccgatcggtgataacttcaccatggggcctgaggatgcgaaactcgcggctgagtggctgagagcgaaacaggtcgttcccgttcattacaatacatttcccgtcattgaacaggaccctgacgctttcgccgaaagtctgcccggaggcgtcggcaaagtcatggcggccggcgagaccattgagcttgcctgacatatgtgtcaaagaccttctgaatcaagcattcagaaggtctttttgtgatgccgccttttttcgggcgtctcattgcgaatgaatcccccgtacccttataataaaagcagaagactgtccttagaggtgaaacgcttggcaacaaagcatgaacaaatcctatcatacatagattcgcttcctgtcggtgaaaaaatttcggtcagaagaattgcgaaagaaatgaaagtcagtgaaggaacggcttacagagcaattaaggaagctgaaaacaaaggattcgtttccactattgaacgtgtggggaccatccggattgaacagaagaaaaaagaaaatattgaaaagctgacatacgccgaggtcgtcaatgtgatagacggccaggtgctcggcggaaaagccggtctgcataaaacgttgaataagtttgtgatcggcgcgatggagcttgacgcgatgatgcgttatacagcggcggggaacctgttaatcgtcgggaaccgaatcaacgcccaccgccaggcgcttgaggcgggcgcggctgttttggtaacaggagggtttaataccgacgacagcattatcgagctggccgatatgcttgagcttccgattctctccacgagctacgatacctttacggtagccgcgatgatcaaccgggcgatctatgatcagctcataaaaaaagagattgtgctcgtggaagacattttgacgcccgcagatcggacagtgacgctgtcccctaaggataagctggagaaatggtacgaaaaaaactatgaaaccggacacggccgcttcccggttatcgatcagcagatgaaaatccacggaatcctcacatcgaaagatatcgcggggcatgaccggtcagttccgattgaaaaagtaatgaccaaaaaccctgtcacggtgatcgggaaaacatctgtcgcctcagcggctcaaatgatggtttgggaaggaattgaagtgcttccggtgacagacgggcatcacaaactgatcggaatgatcagccgccaggatgtcttaaaagcgcttcaaatggttcaaaagcagcctcaggtcggggaaaagctggatgatattgtttcaaggggatttaaagaagaggaagatgacaaaacgccggccgtttatcaatatgaagtcacgccgcaaatgaccaatcagctcggcacgatttcttacggggtgtttacgacgattttaacccaggccgccagccgatttttacgctcccgcaaacgcggcgagctggtcattgaaagcattacgattttcttcctgaagcccgtacagatggagtcggtcattgaagtgaaaccgcgcattttagaggcgggccggaaattcgggaaaatggaagtggaagtgtcaagccaaagcggcatcgtatcaaaagcgatgctcatggtgcagctgatggagagaagttaagggacgcacccgggtcccttagcattcattatgcgtggtccctctccgcttcctttgcatggatgggctcataatgcttataggctttatacccggcccatgcgctgcctgctccgattaaaatgaagacgccgccgatgaccagggtcaggacggagtgaaacagaatcatttggtttactccgtacaaaagcaccagcgcgcctaatgccatacttgatttagccgaaaaacattccttctccagcgcccgtttcgtctggattccttttactttgtaatacacgtaaaagcaggcagaaagcccgatgagaaaaacaaaaaccagcataaatgaaatcctccattatatgagtttgcaaaaccgtttataccgttgctgaagattttccttttccatggataaagagtatgattaaatgaataaaaacgaaaaggagaaaacgatgaaatccgaactgatcagaaccatatcattatatgacaccattatcttacatagacatgtgaggcctgacccggacgcctacggttcacagtgcggccttacggaaatcctgcgggaaacgtatcccgaaaaaaatatttttgccgtcggacagcctgagccgtccttgtcttttttatattccctcgatgaggtggatgacgaaacctataaagatgctcttgtcatcgtgtgcgacaccgcaaaccaaggcagggtcgacgatcagcgctaccattccggcgcaaagctcatgaaaatagaccaccatccaaatgaagatccgtatggcgatctgttatgggtcgatacgaatgcaagctccgtaagcgaaatgatctatgagctgtacctggaaggaaagcagcacggctggaaactgaatacgaaagcagctgagctgatctacgcgggtatcgtcggtgatacggggcgtttcttattcccgaacaccacaaaaaagacattaaaatacgcgggagagctcattgagttcccattttcatcgtcagagctgttcaatcaattgtatgaaacaaaattaaatgtggtgaagcttaacggctttatttatcaaaatgtgtcactgtctgaaaacggcgtcgcttccgttttcattaaaaaagacattttggagacatatggaaccaccgcttctgaagcgtcgcagcttgtcggaacactcggaaatatttcgggtatccgcgcttgggtgtttttcgtagaagaagacgatcaaatcagagtccggttccgttcaaaaggtccggtcatcaacggaattgcccggaaatacaatggcggcggacatccgcttgcggccggcgcatccatcttcagctgggatgaaaccgatcagattcttgctgatctggaagagatatgtaacgaacacaagtagaggggagaccctctttcttagtgttcatctgtcacggggatgaaccagcagccgaattcagtcaggtcttcgtagacgcggagattacagatttggagttctttttttatgagggaagcgagtgtgtctgtttctgcatatgcggaatagccttgtctgattcgggctgcatgatcttttgccaagcggcgttcactaaaaacctccattttcccttcctcccttcagactcattgaaaatgtctcatttacagtttataaaaaagcggagaaaaaagcgacagatatatggtaaatttttaaaaatgacataattacgtcgcaaaagaaatatgaatttcgacagacaatctcgtataaatcgtcagttcctttacttcagccttaaattccttctcatttatggtgtatattttgttttcgatcgtccgttttaaaagttcctttgttttatacacgctttcaatatcctttgtgatgacttcagaaatattatctttcacttgttcctcaaatttcatcttgtcaggctgggcgattctgtatttttccccattgatcagcttcacatcaacactttggatgagaagtctttgcttattatcctcatttaatttatgaagatccttctgatagatggagatttggttttttaaatcccgcgcgtgctcacgctgcttttcaattaacgtcacctgttcttcctgaaacgttccgtatgtaaacagaaagaacagccagctgacgatggctccgcacatcattcccgcaaaaaaacgctgccatcccggttttttataatactcggggattctcatgatgacatattctcctgggtcagccatgaaataatcagccagccggtctgcgcgccgcccattgctgaaataattaaaagaagctgtttgaagatgtcgcgcgtgttgccttcaaacagcccccgctcgaaactgtataccgcgtcaaatgttcccccgatggccgcgacaagcgcccagatcttcagcctgttcgccaattttgtgatcgctgtcagcggaggctcgcctgataaataagctccgaggccgccgatcagcgcgccgccgagcaacacaccgagggcgataaaataactgctgatgaaattcgccataaatccggcttcctgatccatatatacaccacctcacttttctatcatattgagcgaaacggacaagtatgatgatgagtcaaaaaaagaacatttgtttcttaagaaaacccgtcttataatgtagaaaggcaaaatgaacgtatgggaaaggagtggcggcattgtcttttgttcacctgcaagtacatagcggctacagcctgttaaacagcgccgcttctgtaaaagagcttgttactcaagcgaaggaactcggatattcatcattggcgctgacggacgaaaatgtgatgtacggcgccattgagttttataaagcatgcaaatcaaacggaattaagccgattatcggtctgacggcttctatatacacggacgatacggagcttgaagcacacccgctcattcttttagcagagacaaacaccggctatcagaacctggtgaaaatctcaagtgcgctgcaatccatggcaaagggcggcatgaagcgaaaatggatgaagagctatcgtgaggggctgatcgccattacgcccggtgaaaacggctacattgaaagcctgcttcaaaccgggaagtttgaagaagcggtccgggctgccgaaggattccgggagctgttcggagacggccgtttttatttagggtaccagccgtttaaaggacatgagacgttatcagaagagattctccgcctgtcagccgaaacggaaatcgctgtctgcgctgcgggggatgtccgttatatcaagaaagaagatcaagatgcgtaccgctgtctgtgcgctattaaagccggagagaagtgggaggatcagagcggggatctgccggacttatacttgaggacgcctgaagaaatggcagagctttacacgcggcatccggaagcgattgaagcagccgcgcgtatcgcccggcaatgccgggtcgatgtcagcctcggacagacacagcttccgtcttttccggcaccggacggcaaatcagccgatgactatttggcggagatctgtcatgaggggctgcgcctccgtttcggcactcctgatgagcgcgctgtccgccggcttgaatatgagctggacgtcatcaggcgcatgaaattcagtgattattttctcatcgtatgggactttatgaagtacgcgcatgaaaagggcattgtgacaggcccgggaagagggtccgcggcaggctcgcttgtcgcttactcccttttcattaccgacgtggatccgcttaaacattctctgctgtttgagagatttcttaatcccgagcggatcagcatgccggatattgatatcgatttccctgatacgagaagggatgaggtcattcagtatgtacaaaataagtacggggccatgcacgtcgcccagattatcaccttcgggacattggccgcaaaggcggcgttaagggataccgggagagtgttcggaatcagcccgaaagaagccgaccagcttgcccgcctgattccgtcaaaaccgggaatgacgcttgaggaggcgaggcggcagtccgctcagctgaacaggcggctgtccgaatccgccgttcttcataaagtgtttcagatcgcaaggaaaattgaaggtcttccgaggcacacgtcaacacatgcggccggggtcgttctcagtaaagagccgctttcggaagttgtccctcttcaagaagggcatgacggcgtgtatttaacgcagtatgcgatggatcacttggaagatctcggtcttttaaaaatggactttttaggtttgcgcaacttgacgcttattgaatccattaaaacgatgattgaaaaagagacgaatacaaaaattgatttttctgagatttcttatcaggatgaaaaaacgttctcactattgtcaaacggtgatacgacgggtattttccagctggaatcatcaggaatgagaaacgtattgaagcgcctgaagccgtcaagactggaagacattgtcgcggttaacgcgctttacaggccgggaccgatggaaaatattccgttatttatcgaccggaaacacgggcgggcgcgtgtggaagtgccgcacgaggacgtaagaaatattctcagtgacacttacggcgtcatcgtctatcaagaacagataatgatgatcgcctcgcgcatggcagggttttcattaggtgaagcggatctgctcagacgggctgtcagcaaaaagcaaaaggacattctggacagagagcgaagccattttgttgaagggtgcataaaaaaggagtattctgtagtcactgcaaacgaggtctacgatctgattgtaaaattcgctaactacggattcaacagaagccatgctgtcgcatacagcatgatcggctatcagctcgcctatttaaaagcgcattatccgttatattttatgtgcgggctgttgacgagcgtcatcggcaatgaggacaaaatatcgcaatatctgcatgaagcgaaggggagcgggattcaagtccttccgccgtcaataaacaaaagcggttttccgtttgcgccggaaaacggagccgtcagatacagtttgcgggccgttaaaaacgtaggcgtctcggcagtgaaagatatttataaagcaagaacacataaaccgttcgaggatcttttcgatttctgctttcgcgtacccgcaaaaagcgtgaatcggaaaaccatcgaagcccttatattttctggcgccatggacgaattcaatcaaaatcgcgccgccttgctggcctccgttgatgtggctttagagcacgctgaactttttcgtgcagacgatgaccaaatgggattgtttttggaagaatcgttctccattaagccaaaatatgtagaggctgaggaatttccgctcgtggacaagcttcggttcgaaaaagaagctctcggtgtttatttctcaagccatcctttatctgctttcagggatctcctgaaaaaaaggggggcgcaagcgatcacagcagcgcggcagatgccgaaggggcagctgtcaatcggcgctttgctcgcgggcatcaaaacgattcggacaaagacaggtcagcatatggcgtttctcacattaagtgatgaaacgggagaaatggaagccgtcgtgtttcctgaccaatatagaaggctgtctccgctgttaaaagaaggcgcgcttttattcgccgccggaaaaatggaagagcgtcaggagaagacacaattcatcatgtcatccgcctctcttcttgagcagacggaggcagacagagcgccgtctgtttacatcaaaatcgaaggcagccggcacaatcaggagtttttggaaaagatgaagcgtattttactggagcataaaggggaaaccggcgtttatctttattatgaaaaagacaagcagacgatcaggctgccggatacttttcatattcaggcggaccatcaggcgttataccgtttaaaagagctgctgggccgcgaaaacgtcgtgttaaaatagtggtaacaataatcattttgttatacaattgaaacaattgtgctatcttatttaaagattctgaaatttttcacctccagcgattgtaccagtctatgcggcagaatatgtaacaaagtacttaaaaggagtgtttagaatgtcattaagagaagaagcgttacatttacacaaagtaaatcaaggaaagctggaatcaaaagcaaaggtagaagtcagaaacgcggacgacttaagccttgcctattctcccggagtagctgagccttgtaaagagatttatgacgataaaaataaagtatatgattatacaatgaaggggaacatggtagcagtcgtaacagacggatcagccgttctcggtctcggtaatatcgggcctgaagcttcacttccggtcatggaagggaaagcagtgctgttcaaaagtttcgcgggcgtggatgcattcccgatcgcgcttgacacaaacgatgtggacaaaatcgttgacactgtgaagctgcttgcaccgacattcggcggtgtcaaccttgaagatattgcggcgccgaactgcttcattatcgaagagcgcctgaaaaaagaaacaaacattccggttttccacgatgatcagcacggcactgccatcgtaaccgttgccggacttgtaaatgcgctgaaattatcaggaaaatccatgtcatccattaaagttgtggcaaacggagcgggagcggcaggcatcgcgatcatcaagcttctttaccatttcggcgtacgcgacatcgtaatgtgcgactctaaaggggcgatttacgaagggcgtccggccggcatgaacgcagtgaaaaacgaagtggccaagtttacaaaccaagaccgcaacgacggttccctgcaggatgtcattaaagatgcagacgtctttatcggcgtatcagtcgaaggcgcgctgacgaaagaaatggtggaaagcatggcgaaagatccgattatcttcgcaatggccaacccgaatccggaaatcatgcctgaagacgcgcgcgcagccggcgcaagcgtaatcggaacaggccgttctgatttcccgaaccaggttaacaacgttctggcattccctggaattttccgcggggcgcttgacgttcgcgcgactcacatcaacgaagaaatgaaaattgctgcggttgaagcgattgcttcccttgtttcagaggaagaattaagcgctgattatgtcatcccggctccatttgacaaacgtgtggctcctgccgttgcgaaagctgttgcgaaagcggcgatggaaacgggcgtcgccagaattacggtcgatcctgaggaagtggctgaaaaaacaagacagctcacagtcatcggcgaataataacacaaaaatgaaatggcagcgcgttggaaaaaaacaacgcgctgctgttcaatatacggactgctggcatttttttaagggcaggtcttaaaaaaatttcagcagaatccttatttcttttgaaaacgctgacagataaggctgaacaacgctttttacggtatgaaatccgtccgtttccgtctgttttgcagcaaaaaatgtcgaatggaggatgacaccgtttgacaaaaaaagtacaatagtttcggtaaagttattattaagtctatctaatcggaagacatgcagtgaagagaacccttcacaaaagggaggtaatcatttgttaaaggatatattcacaaaaaagaaaaaatatgcttccgtgccgtctgagcaggcaaaacatgatgttccggaaggcattatgacaaagtgctccaaatgtaaaaaaatcatgctcacaaaagagttagataaaaacctgcgcgtctgcatgaactgcgggcaccatttcccgatgaatgcaaagcagcgcattgaaagcctcctggatgaagattcattcgaagaattcaaccagggaatgatatctgaaaacccgctcggtttcccggaatacttagaaaaaatcgaaaaagaccgtgagaaaacatcgctgaatgaagcggtggttaccggaaaaggaaccatcagcggattccctgccgtgatcgcgatcatggattcaacattccgaatgggcagcatgggttcggttgtcggcgaaaaaatcacgcttgcaattgaaaaagcaaaagaggaaaaagtcccgtttatcatctttaccgcttccggcggcgcacgtatgcaggagggggtcttaagccttatgcaaatggccaagacaagctctgcattaaaactgttcagtgaggagcagggactgattatttctgtcatgacccatccgacgacaggcggcgtatcggccagtttcgcgtctctcggtgattataatttcgctgaaccgggcgccttgatcggatttgccggaagacgtattattgaacagacgatcggggaaaaactgccggaagatttccagacggcggaatttttattaaagcacggccagcttgatgcggtgattcaccgaaacgacatgaaagacaaactcgcatttctgctggacatgcaccaaacaggaggtgagcatgagtggctgcaagattagaatttgaaaaaccagtgattgaactgcagacgaaaatcgccgaactgaaaaaattcacccaagattcggagatggatttaagcgctgaaatcgcaaggcttgaagaccggctcagcaagctccaggatgagatttataaaaacctgaagccgtgggacagagtgcagatcgcacgccttcccgaccggccgacgacgcttgattacattcaatacctgtttaccgacttttttgagtgccacggagacagaacatacggagacgatgcggcgattgtcggcggagtcgccaaatatcacggcatgccggtcaccgttatcggacatcagcgcggaaaagacacgaaagaaaaccttgtccgcaatttcgggatgcctcaccctgagggctaccgcaaagcgcttcgtctcatgaagcaggcggataagttcaaccgcccgattatttgcttcatcgacacgaagggagcgtacccgggtaaagcggcggaggaacggggacaaagtgaagccatcgccaagaacctgttcgagatggccggcctgacagtgcctgtcgtttgtatcgtcatcggggaaggcggcagcggaggcgcgcttgcattaggtgtgggcaaccgcatgctgatgcttgagaactcgacgtattccgttatttctcctgaaggagccgcgtccattttgtggaaagactccagccttgcgaaaaaagcggccgaaaccatgaagattactgcgcccgatttattagaattaggaattattgatgatatgattaaagaagtgaagggcggagctcaccatgatatcaagcagcaggcgggctatattgacggtattcttaaagaaacgttaaaatctcttcttcaattgaacgccgaagaattgatctcacagcgctatgaaaaatataaagcaatcgggaaagtttcggttgaggatcaatatatcggggtaaactgaatagacgtgaagcctatggctcacgtttattttttgtgatttttgtgatattccttaaattttatttaaaaacaatttatttaattgtataataggtaaggtttcatgggagctcaggcgtcccttttcattgttttagggcaatgatcatgatatgtttaacatatatatgttgctgaggtgaataggaaatgaagcgtataggagttttaacgagcggcggggattccccgggtatgaacgctgcggtgcgcgcggttgtgcggaaagctatctaccacgacgtcgaagtgtacggaatttataacggttattcaggattaatcagcggaaaaatagagaaactggagcttggttcggtcggtgacatcatccaccgcggcggaacaaagctgtatacggccagatgtcctgaattcaaaacagttgaaggccgtgaaaaaggaatcgaaaatttaaagaaactcggcattgaaggtcttgtcgtcatcggcggagacggttcatacatgggtgcgaaaaaattaacggaacacgggtttccgtgtgtgggtgtaccgggtacgatagataatgacatcccgggaactgattttacgatcggatttgatacggcgctaaacaccgtaattgatgcgattgataaaatccgtgacaccgctacgtctcatgagcgtacatacgttattgaagtgatggggcgccatgcgggcgacattgctttatgggcaggtcttgcaggcggagcggaatcaattttaattcctgaagcggactacgatatgcaggaaattatcggccgtttgaagagagggcacgaccgcggcaaaaaacacagtatcatcatcgttgcagaaggggtaggcagcggagttgaattcggaaaacgcatcgaagaagaaacgaaccttgaaacacgggtatccgttttagggcacatccagcgcggcggatctccaagcgcttctgaccgggttcttgcaagccgcctcggcgcttacgcggttgagcttctgcttaaaggaaaaggcggacgctgcgtaggtatacaaaacaacaagcttgtagaccatgatattatagaaattttagaatcaaaacatactgttgaaccaaacatgtatcagctttcaaaagaactgtctatttaaggcggaagaagctgaagatttcagaaggaagtgaacgagttgaaaaaaacaaaaatcgtttgtacaatcggtccggccagtgaaagtgtagaaatgctgacaaaattgatggaagcgggtatgaacgttgctcgtctgaatttttcacacggtgatttcgaagagcacggcgcaagaatcaaaaacatcagagaagcaagcaaaaagctcggcaaaaacgtggggattctcctcgatacgaaaggtccggaaatccgcacgcacgatatggaaaacggcgcgcttgagcttcaggcgggaaatgaaattatcgtttctacgaaacaggtgctgggaacgcttgaaaaattctcagtttcttatgaaggcctggcagacgacgtgtcagcagggtctatcatcctgttggatgacggtttaatcggattggaagtgctggaatcaaatccggaaaaacacgaaatcaaaacaaaaatcttaaacagcggcacgctgaaaaataaaaaaggcgtaaacgttcccggcgtcagcgtcaaccttcccggaattactgaaaaagacgccaaagacatcgtattcggtatcgagcaaggcgttgatttcatcgctgcgtcatttgtacgccgttctacggatgtcctggaaatccgcgaactgcttgaagagcataacgcgtctgacattcaaatcattcctaagatcgagaaccaggaaggcgtggacaacctggatgcgatcctggaagtatctgacggcttaatggtagcgcgcggagacctcggcgtagagattccggccgaagaagtgccgctcgtgcaaaaagaaatgatcaaaaaatgcaacgcgctcggcaaaccggttattactgcgacacaaatgcttgacagcatgcagcgcaaccctcgtccgacacgcgctgaagcaagtgacgttgccaacgccattttcgacggcacagatgccatcatgctttccggtgagacggctgcgggacaatatcctgtcgaggcggttcaaacaatgtttaacatcgccacacgcacggaagaatctctgaactacaaagaaattctgtctaaacgcagagatcaggtcggcatgacgattaccgatgcgatcggccaatcagttgcacacacggcgatcaatctgagtgcggcagctatcgtcacccctacagaaagcggccatacggcgcgtatgatcgccaaataccgtccgcaggctccgattgtagcggttacggtcaatgagtctgtatcacgcaaactcggccttgtattcggtgtattcccggcaagcggccaaaacgcgacttcaaccgatgaaatgcttgaagacgcggttcaaaaatcacttgacagcggcatcgtgaaacgcggtgatctgattgtcattacagctggttctgtcggtgaatcaggcacgacgaatctgatgaaagtccacactgtcggcagcattatcgcaaaaggacaaggcatcggacgcaaatctgcattcgggccggtcgttgttgcaaaaaatgcaaaagaagctgaacaaaaaatgacagacggcgcagtattggttgcttcaagcactgaccgtgacatgatcgcttcacttgaaaaagcatcagcgctcatcactgaagaaggcggtctgacaagccatgcagccgttgtcggtttaagcttgggcattccggttatcgtcggtctggagaacgcaacttcagttttaacagaaggacaggttatcacagttgacgctgcccgcggcgctgtgtatgaaggccgcgcaagcgttctttaaacagctttaaaaaagagagggggggttctcccttctcttttgtctttaggctgattttcctattcccatgcgggcggtgacgcgcttttagaagggcaggagggcagaaaaatgagagtgttattcttactgtttatcgtgtgtccggcaattgaaatcggcttgtttctgctggcgggaaaatggctcggtatttttccgaccttccttctcatcattttgacaggcgtgttaggcgccttggtggcaaaaagacagggaaccgatgtgtaccatcgggtgatgcgcgacctgcagcacggcaaaatgccgggggaagcgcttcttgacggaatatgcgtctttttcggaggcctgcttttgatgcttccgggttttctgtccgatattgcaggggcctgtcttctgattccgttcactcggaaccgcatgaagccgcttttgttcaaatggctgagaggaatgtcaaaaaacaagcggatcattatcaaataaaaacggcagccttcttacagggctgctgtttttatttggattgaacagtaatataggcccatatttcttttaaagcgcccgttgtgataaaggcctgaatgaaaacaagcagcgcgggccccgcagccagtcctaaaattccgaacaatttaaagccggcaaacagggcgattaaggtcgcaagcggatcaagtccgattgacctgcttaaaattttcggctccgtcagctggcgctgtatgagaaccacaatatataaaacaccgagaccgatcgcttgaggaagctgaccggcaatggccaaatacataatccagggaacaaagaccgacccggcgccgagatacgggagaaggtccaccaggccgataaaaaaggcgatggttgccgcatgctcaatccctaaaagaaaaagtccgataaagacaatgatcatcgtgaaaagtatgagcacggcctgcgccttaatgaaacctgccatcgcttttttcagctctcccgatacggctttggcgtttgccgaaacccgttccggaagaatggaataaagcagcgccttcagcttatgccagtcctttgtcataaaaaaagtcgccagcattgcgaaaatgaagacggcagctgtattgggaaggaaggcaatccatttcggcaccagctccaaaagatgtgagagcatcagccccgcatttttagcggctgtatcaccgagggtctgaatatgcgtcacgatggatgcctgctgattggtttccagtccgttaaataggacggtcagctcgtggtacaatggctgaatgcgggaagtgaacagctcttcacaatacgtcataaaggcgctgatatggggagggagcgttttggccagataggcggttcccgaaatgatttccgcaacgagaaatgtcgccgcgccaagaagaataagcaaaaagaagaccaggacaatgactgtattgactgaccggggcatccccgtcagtttgtccagccagtcaacaacgggaatgatcgctgatgacagaataagggcgatcagaaacggataagttaacggaaatgaggcgtaaccggccgctaaagcgccgccggccgcagcgagtacaaacagcgcgcggaaaaaaacagttgcatagtgcgggttcacatcgatcctcctctcggtcggcacgtcctattacattagtttattcgtcaaaaaaaaggatatgaatacagatatgatgaaagagggtgctttcaggatgtttacacaggcgaatttatttttactattattgctggccatcgcattggtagccaaaaatcagtcattgctttttgccgtcggctttctcattgtgataaaagctgtcggtcttgatcagaaactatttccggttattcagtcaaaaggcatcaactggggggtcaccgtcattacaatcgccgttttagtgccgattgccacaggtgatatcggttttaaacagcttggagaagcgatgaaatcatattatgcgtggatcgctctcggtgccgggatcgcggttgccttaatcgccaaaaacggtctcaccttattggaaaacgaccctcatattacaacggcgctggtcatcggcacgatacttgccgtcgcgcttttcggaggcgtcgccgtaggcccgttaatcggcgccggaatcgcctacttggtcatgcaaatcgttaaaatattcacctcgtaaagtaaaaaagcggcgtaaagctgcttttttttgtggagaaaattagagtttgcacttgcgcattttgtagttcagacaaatgccatttgcattattccgatgaatgaagtggcttaccatgtaacaaagaacttcgggattgacggcgcacatggagcgaaaacagcgattgcattaattccaattgatgaatggattaaaagctgatggaatttatgcgctgataccaaagcaaaacttgaagtgttgtcaaaataagcggagaccctttcctccaatttgaaagtttgttaaatttataatgagaatgaaaaaacacaattcggttggtagtccggatgcatgatttaaaatgtcagtaaccttcccctcctcgggatgtccatcattcttcagtaaatttaggaggagggaatcgttatgaaattaacggtttactacgatggtcagttttgggtaggagtcattgaagttgtgaatgatgggaaattaagagcaattcgtcatttgtttggacaagagccaaaggattcagaaataatgcattttgttaataatcaacttttacagactctctcccacattgaacaagaaggggtttgtgttaaagcaaaatctaagaaattaaacccaaaaagattacaacggcaagcttctaaagagatgaaaaatatcgggatatcaactaaggcgcaaaaagcgataaaacaggagcttgaagcaagaaaagaaaagaaaaaacaactgaatagaaaacaaagagaaaaaataaaggaacaaaaatatttaatcagaaaacaaaaagcaaaagaaaagcataggggcaaatagttggagaacccgatgaagcccttcgattgtaaagttgagcggcatcagtttgtttcttcggactgttttagaaaaaagaagtagaaatcgagcccttctcgagatgaggagggtttttctgcaatttatttaaattcacttacatcagtaaatgagtcagtttcaattgatgaacggtttgatgaggatatttacgggctgaaaacagcaaatgcagtcaaacgattccagtctatgtgcggcatgactgctgacggcattttggccaaagactaggtaaattactaaagaatctaaggttagtatttgggttttaatatttgagtaggggggaaataatgctatctcttaatagagctttaaaattacgtgatttagaagtttttcgtgtgctgaaagatggtaacattttatcttacgtaataattgaagatactcgaaagccatttacagaagaagacaaaaaattagaaccactgtgttatatggacgaagaagatattaatgcgattttaaacgtttttaagatttcaattgttaatgatgaaaaattaaatgaagataaatcaatttttataagatcttacttttctgaatttgttaatcatacaaatttaacgaattttattattaaagaatatgttcaaaagaatttatatgattacgatgatgaagatgacatcattttttttaatagaattttacgtagtataggatcagattatgttatcaaagaatttgacgatataaattggatttatttatctcaagattgatttcttatttagattttgaaggagtacagaagataatttctgtactcctttttaaggcgaaatatagacttctagtttctctttatagaataaatacacttgacgaaaatcgtaagttcagcacccgcaaggggtgtatataagtgctttattgtcatggatgttctatttgttattttcggttaattagggaaattgaggtattttttcatttatagaaaataagaaattaacggaaaataaatcaaaagaggaggaggggaatgcatggtggagtctcaacttcaaatacagcgggggggttgtttgaatgaatattaaaaaagcaatttgtttctctatctctgctttcgctattccgttcggtgtaattgcttttgttggaaacacgactcatcttcatcataatgcagccaaaactgataatgaggtaatacaactagctgcgcgactgtaaacattatttcgaaacaaaaaaagatgtggcctttttagggctgcatcttttttgtcatgtattttcgttttttctctttttaggcggggctgcggctgctgcatttataagcatggtaacaggttatgtgaagtccgcagaaaaatacaaatggattgttatataaacaaaagcgaaatacgaagtaacaacaaagatatatagaaaatttgagccaactaaaaccaagacatggatttctgaagctgatccgaacattgattcagtcgagtaaacaaaataaccctcttctccggtaaagaaggagggggaatttgcggtgaagttgtcgcgcctgtccttttaaagtctcctccaaaacacccccaaatgaaaacatgagaatacatggttttacaaagcgcctgaaagcaagcgattaaatttatcaacgcaaaaccttgatatatagggcttttaaaacatttttagttaaaagtctacaaattaatcagattattgtttataataagaataggcttaaacttaaataagcttataagaatttgttatgttcctctataagcatatcggttatgtaaccgcaaccagtgaaatgtaagcattttcttaaaggggaaagggattgtttgcatgactcattttaagtaagccgtatgttttatatactctttaaaggggaattttgattgaaaaggagaggttgaatatgacagcaacacgcggtcttgaaggggttgtagcaacaacatcatctgtaagctctattatcgacgatacccttacatatgtagggtacgatattgacgacttgacagagaatgcaagttttgaagaaatcatttatttgctgtggcatctgcgcctgccgaataaaacggaacttgctgaactgaaaaaacagcttgcgaaagaagctgccgttccacaagaaatcattgagcacttcaaatcctatcccctcaataacgtacatccaatggctgcactccggacggcgatttcattactcggtctgactgacagtgaagccgatgttatgaatccggaagcgaactacagaaaagccatccgtctgcaggcgaaagtgccgggcattgtcgccgctttctcaagaatccgcaaaggacttgatcctgttgaaccgaaggaagagtacggaatcgcggagaacttcctttacaccttaaacggtgaagagccttctccgatcgaagtggaagcgtttaacaaagcgctcattcttcatgcggatcatgagctgaacgcatcaacatttacggcgagagtatgtgtcgccaccttatccgatatttactcaggcatcactgccgccatcggcgctttaaaaggaccgcttcacggcggagccaatgaagccgtcatgaaaatgctgacagaaatcggcgaagtggaaaacgccgagccttatatccgcagcaaaatggagaaaaaggaaaaagtaatgggcttcggacaccgtgtgtataagcatggagacccgcgcgccaaacacttaaaagaaatgagcaaacgcctgacgaatctgacgggtgaaagcaaatggtacgacatgtcaatccgtgtcgaagaaatcgtgacgtcggagaaaaaacttccgcctaacgttgatttctattctgcatctgtataccacagtctcggcattgatcacgatctgttcacgccgatctttgcggtcagcagaatgtcaggatggatcgcccatattcttgaacagtacgataacaaccgcctcatccgcccgcgcgctgactacacgggtccggataagcagacttttgttccgattgatgaaagagcctgatcaaacgggaggctggtgattttcatgtcgttagcctcttgttaatcaagcccggattggtttacaattttaatagaatcttgagaaaagtcattttattttctatacaagaaaaataaaatgttttctaaatatgaattacatactgggaggtaatattgtgtcacaaggtgaaaaaattacagtctctaatggagtattaaacgtaccaaataatccgattatcccgtttattgaaggcgacggcacaggccctgatatttggaacgccgcttctaaagtattggaagccgctgttgaaaaagcatataaaggcgagaaaaaaatcacgtggaaagaagtttatgccggtgaaaaggcttataataaaacaggtgagtggcttcctgccgaaacgctggaagacatcagagagtacttcatcgccatcaaaggtcctctgacgacaccggtcggcggcggtatccgttctctgaacgtggcgctgagacaggagcttgatttgtttacgtgcctgcgccctgtcagatatttcacgggagtgccttccccggtcaaacgtcctgaagatacggatatggtcattttccgcgagaatacggaagatatttacgccggaattgagtatgcgaaaggttctgaagaagttgaaaagctgatcagcttcctgcaaaatgaaatgggtgttaacaaaatccgtttccctgaaacgtcaggaatcggcatcaaacctgtttctgaagaaggcacaagccgcttagtcagagctgccattgagtatgcgatcgaaaacggccgtaagtctgtcacgcttgtccacaaaggaaacatcatgaagttcactgaaggggcatttaaaaactggggctacgagcttgccgaaagagaatacggagataaagtattcacttgggctgaatatgaccgcattgtcgaaaaagacggaaaagaagcggctgataaagcgcagagcgacgcggaagcggcaggaaaaatcatcgtcaaagacagcatcgctgatattttccttcagcagatcttaacccgtccgagcgaattcgacgtcgtggcgacaatgaacttaaacggagactatatctctgatgcgcttgccgctcaggtaggcggaatcggaatcgcgccgggagcgaacatcaactatgaaacagggcatgcgattttcgaagcgactcacggaacggctcctaaatatgccggccttgacaaagtcaacccgtcatccgtcatcctttcaggagtgcttcttcttgaacacctgaactggaatgaggctgccgacttgatcattaaatctatggaaaaaacgattgcttcaaaagtagtaacgtacgattttgctagattaatggacggtgcaactgaagtgaaatgttcagagtttggtgaagagctaatcaaaaacatggactgaacctaaagcagacttctaatgaagccaaaaaaggagaagagaatcatgggaaaaacacgcagtaaagtttctgttatcggagcaggatttacgggagcgacaacagcctttcttacagctcaaaaagagcttgcagacgttgtgctcgttgatattccgcaattagaaaacccgacaaaaggaaaagcgctagacatgctcgaagcaagtccggtccaaggatttgacgcgaaaatcacaggcacgtccaactacgaggacacagccggttctgatatcgtcgtcatcacagccggaattgcgagaaaaccaggcatgagccgtgatgatctcgtatctacaaacgaaaaaatcatgagaagcgtcacacgtgagatcgtgaaatattctcctgactgcattatcgttgtattgacaaaccctgttgatgcgatgacatatgcggtgtacaaagaatcaggcttcccgaaagaacgcgtcatcggacaatccggagtgcttgacactgcgcgattcagaacattcgtcgctgaagaattaaacctgtctgtaaaagatgtgaccggttttgttcttggcggacacggtgacgacatggttcctctcgtccgttattcctatgcgggcggcattccgcttgaaacgcttatcccgaaagaccgtcttgatgcgattgtagaacgcacaagaaaaggcggcggggaaatcgtcaaccttctcggcaacggaagcgcctactacgcgcctgctgcgtcactgactgaaatggtagaagccattttgaaagatcagcgccgcgtgcttccgaccatcgcttacttagaaggcgaatacggtcatgaaggcatttacttaggcgtaccgacgattatcggaggaaacggcctagagcaaatcatcgagcttgaactgacagactatgaaaaagcgcagctgagtaaatcagttgaatctgtcaaaaacgtgatgaaagtattgtcataagaaaaaagggaaggcttccgaatcagaagccttcctctttttacaattaatgaaagcgttttctttttccctgagcgatcctttctctgaaaatgatcaaaaaggcgaattgtctgaacgggcagtattggataaaatgaaatcataaagtgatatgcagcacataaaatagagaaaattggatgtcggggaaaatagacagcggagggcgcagcatgaacaaaaaaattttagttgtagatgatgaacaatctatcgttactcttttacagtataatctggaacggtccggctatgatgtcattaccgcatcagacggcgaagaggctctggagcaggcagagaacgaaaatccggatttaatcgtactggatgtcatgctgccgaaagtggacggaatcgacgtctgtaaacagctcagacagcagaaaatgatggttccgatcttgatgctgacagcaaaagatgaggagtttgataaggtgctgggactggagctcggagcggatgattacatgacaaagccgttcagtccgcgggaagtcactgcgcgggtgaaagccattttaagaagggctgacatttcttcgctgtcacaaggcagagaagaggaaaaggacgggcagattctaatcggcgagctgaaaattcttccggagcattacgaagcgtacttcaagtcagaacagctggaattgacgcctaaagaatttgaactgcttctgtatttaggaaaacataagggaagagtgctgacgagagatcttctgctgagcgcggtctggaactatgattttgccggggatacccggattgttgacgttcatatcagtcatctgcgcgacaaaatcgaatcaaataccaaaaaacccatctatattaaaacaatcagaggtttggggtataaactggaggagccaaaaatgaatgaataaagtccgtgtgcgtctgttcgctttactcgttgtatgtatcatattggttttcagtgttctcggcctttttttacagcagcttatttcctcatccgctgaagaaagaacggcggatcagctgaaaaaggaatcggtatacatagcgggccttcttgacaccggccgaatcggcaataaaagcaatgaaacggtaatccgtgacgccggccgcaccctcggtataaacgtcgccgtgctcaacgagaagggtgacgccgtatatcattccggcagtcatgctgatgattcagccgtaaaggagttcatttctcacaataaaagtgaggaagccgtacagtcgaaaagcaaagtcatccgcggcactgccgtaaaaaatggcgccgggagaattgcggggtatgtactcgtttcctctgagatcaacggcggttcaagcgttaccggagaaatgtggggcatgctggcagcaagtctttgtaccgcttttatcattatcgttttcttttatacaaacatgacgtcccgttacaaaaaatcaatcgacgccgcgacaaaggtggcgacggagctgtccaaagggaattacgacgcccgctcctacagcggctacgcaaggcggtcggaccgtctcgggcgtgcgatgaacagcctggcggtcgatttaatggaaatgacgagaacgcaggatatgcagcgcgatcgtttgttaaccgttattgaaaatatcggatccggtttgattttaatagacgggagaggttttatcaatctcgtgaaccggtcatatacgaagcagtttcatacaaagcctgaacgtctgcttcggcgcctttaccatgatgcgtttgaacatgaggagatcattcggcttgtcgaagacatttttatgacggagacgaaaaaatgccagctgctcagacttcccatcaacattgagcggcgctactttgaagttgacggcgttccgatcatgggccctgacgatgaatggaagggcatcgtcctcgtctttcacgatatgacggaaattaaaaaattggagcagatgagaaaggacttcgtcgccaatgtctcccatgaactgaaaacaccgatcacctcgattaaaggatttacggaaacactgttagacggagcgatgaaagacgaaaaggcgctttcagactttctgtctatcattctgaaagaaagtgagcggctccaatctctcgtgcaggatttactggatttatccaagatggagcagcaaaactttacgatgcgcgtagagtcctttgatgctgcaaaaattctgcatgaaattgaagcgcttttgcggcataaggctgaggaaaaaggcatcagctttcagctcgatctcccggaagagccgatttttgtgacgggtgacgcgcacaggctgaagcaggtatttttgaatctggcgaacaatgccctgacctacacgcctgaaaaagggacggtggggatttcggtacatgtgaaagaaaccgttgtcgatatcaaagtgtccgatactggaatcggcattcagaaggaagagatcccgcggatatttgagagattctaccgtgtggataaagacagaagccgcaactcgggaggaaccgggctcggcctcgccatcgtgaagcacttaatagaagcccatgaaggtaaaatcgaggtcacaagcgagccgggacagggcactgtatttaccgtgacgctgaagcggcagccggaagcgtgatcagctttacaaaggattaacaatttcttcatgacctgttaaacctatcttgttaggatataacagaaccccttcatccaaggagccaattttgacggcgggaacgtgttttcttgttcccgtccttttttgcgttttcgcagggttcgctcattttcctttcaaattgaactttgttaaaataagagaagctgtgagattaaaaaatagaggaatgacgagcttttgctcttaggaggatattgaatgacggaacgaaaaaaattagtgcttgtcgacggaaacagtctggcgtaccgggcgttttttgcattgccgcttttaagcaatgaaaaaggcatccatacaaatgccgtatacgggtttgcgatgattttaatgaaaatgctggaagatgaaaagccgacccatatgctggtggcttttgatgcgggaaaaaccactttccgccacagcacgtttaaagaatataaaggcggaagacaaaaaacgccgccggagctttcagaacagatgccgttcatccgcgagctccttgatgcctataacatcagccgctacgagcttcctgaatatgaagcggacgatattatcggcacccttgccgtatctgctgaaaaagacggcttcgaagtaaaggtagtgtcgggggacaaggacttaacccagcttgcaaccgggaaaacgaccgttgccattacgagaaaaggcattaccgacgtggaagattacacgccagagcacgtgcaagaaaagtacggtctgacccctttgcaaatcattgatatgaagggattaatgggggattcatccgataacataccgggcgtccccggcgtcggagaaaaaaccgcgattaagctcttaaagcagttccattcggttgagaaactgcttgattccattgatgaagtcagcggaaaaaaattaaaagaaaagcttgaagaatataaggaacaagccctgatgagcaaagagctggcgacgattatgacaaatgcgccgattgaagtcaagcccgaagatttagattaccaagggtttgaccgtgaacaagttgttgccatttttaaagaactcggttttaatacgcttcttgagcggctcggtgaagaaagcggggaaacggcggaagaaaattttgaagacatcaatgtcgaaacggcagaagaaatcaccgaagatatgctcgtttcgccgtccgctttggtcgtcgaacaaatcggtgataactatcacgaagaaccgatcctcggcttttccatcgtgaatgaaacaggtctttattatattccgaaagaaatcgccattcagtctgaagcttttaaatcttgggctgaagatgaatcgatgaaaaagtgggtgttcgacagcaaacgttccgtcgtcgctttgcgctggcagggaattgagctgaagggaacggaatttgacgcgcttcttgctgcctacattataaacccgggcaattcgtacgacgatgtcgcgagcgtagcgaaagaatatgggctgaatatcgtttcaaaagatgaagcggtatacggaaaaggcgcaaagcgcgctattccggctgaaaaagagcttgccgatcatctcgcgcggaaagcgtctgccgttaacagccttcgtgacaaactgcttgacgctttggaagaaaataatcagcttgaattatatgaagatctcgaactcccgcttgcgcttattctcggagaaatggaatcaatgggcgtcaaagtggatgttgaaagactgaagcgaatgggcgaagagctcaaggcgaagctgaaagaatatgaagaaaaaatccatgacatcgccggtgagccgtttaacatcaattcaccaaaacagctcggcgtcattctgttcgacaagctcggcctgccgccagtaaagaaaacaaaaacaggctattccacttcagctgatgtgcttgagaagctcgccgacaaacatgatatcgtcgcgtacattctgcaatacagacaaatcggcaaactccaatcgacttatattgaagggctgctgaaggtcacgcgcaaggattctcataaggtgcatacacggttcaatcaggcgttgactcaaaccggacgcctcagctcaacggacccgaacctgcaaaatattccgatccggctggaggaagggcggaaaatccgtcaggctttcgtaccgtccgaaccggactggcttattttcgccgccgattattcacaaattgaattaagggtgcttgcgcatatttcaaaagatgaaaatctgatcgaagcgtttacgaatgacatggacattcacacaaaaaccgccatggacgtgtttcatgtcagtgaagatgaagtgacacaagcgatgcgccgccaggcaaaggccgtcaatttcggcattgtttacggcatcagtgattacgggctgtcacaaaacctcggcatcacccggaaagaagcgggcgcttttatagaccgctatttggagagcttccctggcgtcaaggcatatatggaagaatcggtgcaggaagcgaagcaaaaaggatatgtcacgacacttatgcagcgccgccgctatattcctgagctgaccagccgcaacttcaacctgcggagctttgcggaacggacggccatgaatacgccgattcagggaagcgccgccgatattattaaaaaagccatgattgacatggcagctgagctaaaagagaaaaacctgaaggcacgattgctgcttcaggtgcacgatgaattgatttttgaagcgcctaaggaagaaatcgaaatattagagaagctggttcctgaagtgatggagcatgctttggcattagacgtgccgctgaaggcggattatgcttcagggccgtcttggtacgatgcaaaataaacagagaaaaaggaagtgatgattgtgccggaattaccagaagttgaaacggtccggcgcactctgaccggtcttgtgaaggggaaaacgattgaatcggcggatatcagatggccgaatatcatcaaaaaacccgccgagccggaggaattcgcgcggcagattgcaggagaaaccatccgatccatcggaagaaggggaaagtttttgcttttccatctggatcattatgtcatggtgtcccacctgcggatggaggggaaatacggtcttcatcaggccgatgagcctgacgataaacatgtgcacgtcgtgtttcacatgacggacggaacacagctccgctaccgggatgtccggaaattcggcacgatgcatttgtttgcgccgggagaggaattgaatgcattaccgctttcacagctcgggcccgaacccgatgatgaagcatttaccgctgcttatttaaaagagcggcttgcaaaaacgaaccgcgcggtgaaaacagccctgctcgaccaaaaagcggtcgtcggcctcggcaatatttatgtcgatgaagctttattccgggcgcgtattcatcctgagacaaaagcgaacagtctgtcagacgggcagataaaaacgcttcatacagaaattaaagacacccttcaggaagcgattgacgcgggcgggagcaccgtccggtcttatatcaattctcaaggggagatcggaatgtttcagctcaaacattacgtatacggcaaaaaggatgagccgtgcaaaacgtgcggcacgatgatttctaaaatcgtggtcggcggaagggggacgcatttttgcgcccgctgccaaaaaaaatcataaactgaagctgtacaagcaggcggcagcagaatgacttttttctaacacagttgatgacctttctccatatatatattgtgattcacccaataggcatatgtcacaattgccgatcaagagaaagggagaaacggatatggagattgtttctttgctgcttttggcttttgctgtcagcttggacagtttttcagtcgggtttacgtatggtttgagaaaaatgaaaatcccgttcaaagcgattgccgtgatcgcttgctgttcagcctctgtgatgtttatatccatgctgatcggccattttctgacaaagatttttcccgtatccgtcacagaaaaactgggcgggctgatcttaatcggaatcggggcatgggtcatctggcaatttttcaaaccggctaaagagccggattacttattgcatgaaaaaacgttacttaatcttgaagtgaaatcgctcggcatcgtgattcacattttgaaaaaaccgaccagcgccgatattgatcaatccggaaccattaacggagtcgaggcgcttctgctcggtatcgccttatccattgacgcgtttggcgccgggctgggagcggccattctcggcttttctccggttatgatgagcgtgactgtcgggctgatgagctcgctgtttgtttcactcggcataaacgcggggcatttgctctcaagatggaattggatagataaaatgacatttttgccgggagtcctgctgattatcatcgggatttggaaaatgtaagaaggagtgggctttttgagcttggtcatcggtttaacgggaggcatcgcaagcggcaaaagcacggtagcacgtatgctgatcgacaaaaaaataacagtcattgatgcggatgtcatcgcaaaacaggcggtggaaaaaggaatgccggcttacggacaaattgtggaagcattcggaaaagacatcctgctggaaaatggcgatattgacagaaaaaaactcggttctatcgttttcactgacgaacagaagcgtctgaagctgaatcaaatcgttcatccggcggtgcgtgcggaaatgctgaaacagcgggatgaagccgttgcgcgaaaagagcagttcgtcgttttggatataccgcttttgtatgaaagcgggcttgattatcttgtcggtaaggtgctcgtcgtcaccgtaccggcagacattcagctcaaacggctgatggagcggaattcccttacagaagaagaagcgatgagccggataacgtcgcaaatgcctttagcggacaaaacaaaaaaagctgacgccgtcattgataacagcggcagtcttgaatatacaaagcaccagcttgaggaagtattgagcggctgggcataaacaaacaccgttcggaaagccgaacggtgtttttctggttaaaaatcaaaattgtcagggtccggaccgacacggaggttttcgttcagatcatcaatccgcttcatatcgtcagctgacagttcgaaatcaaagacatttgcattttcttcaatacggtgttttttagttgatttcggaatggtgatgacaccgttttgcaaatcccagcgcaaaatcacttgagcggctgatttgccgtacttctcagcgatctcctgtaagacgggatgatcaagcagctgcccttgcatcaatggcgaccacgcttcaagctgaatgccttgttcagtgcagaaagcaagcagttctttctgtgtcagacgcgggtggtactccacctggttgatcatcggcttgatttccgtttctttcatgagatgtttcagatggtgaatttggaaattgctgaccccgatcgccttaatgcgtccatcctggtagagggtttcgagcgcccgccacgcatcgatgtactttccttcgacaggccaatgaatcaaatataaatccaaataatctaaaccgagtttttctaagcttgtgtcaaacgcttttaacgtttcttcatatcctaaatcggcattccacacttttgacgtgacaaaaatgtcttcacgttttaatcccgcttcttgcagtccttggcggatgccttcgccgacactctcttcatttccgtaaatcgcggcggtatcgacgctgcgatagccgtgcaccaatgccgttttcaccgcgttgacgagttccgcgccttcctctactttgaaaactccgatgccgaaccaaggcatctctactccgttatgcaatgttgcttttgcttgtaaatgtgttgtcatgtatatattcctcctattagttgtctgttgaaacaatcaaaatgcgctgaagaaaaactcacctcctttcaagagcagtgcgatcccgcttttcaagcttcctgctccatccggttaatacgaccgcgctgagcaccatcagcgccccgatccaagcggtatgaatgattccgattgagtctgtaatgattccgccggcaaacgagccgatcgcgattccggcattgaatgccgcgatgtttaaggctgatgctgtatcaacggcgcttggcgcaaaacgttcactcagcatcacgacatatacctgaagccccggcacattcataaacgccaacagccccatgaaaataatggtgatcagcccggctgttttaaacggcgcggtaaaagtcagaacaaacagcacagcagcctggacaatgaacatataaaacaaggctttgagcggattccggtttgataaacggccgccaatcatgtttccgatagcaatcgcaattccgtaaatgagcaggatggccgcgacggtttctttctggaaaccggttacctcctgaagaagcggagataaatacgtaaacacgacaaacgttccgccgtagcctaacgcggtaataataaataaaagcaataaccggccgtttgtgacgagtttgacctgctcggaaaatgcggttttcgtccctttacgcaaatgtgacggaacgagaagcgcgtttgtgaggaatgcgatgattcctaccgccacaatgacggcaaaggcaatcctccagccgaattgctggccgagataggtgccgaacggaacgccggtcaccgtagccaccgtcagccccgtaaacataatggaaatcgcgcttgctcttttatgctccggcacgatattggcggcgattgttgccccgattgacatgaaaatgccgtgggaaaacgccgaaataacccgtgccgccagtaagatgccgattgaggaagcgctcgctgcgagtgtatttccggcgataaaaattaacatcacccagagcagcagcgttttccgtgacatgccggatgtgagagatgttaaaaccggcgcgccgatcgttacgcccagagcatacatggaaacggtaagccccgccgttgtcacaggtatatgcagatcttgagatataagcggcagcagcccgacgctgataaattcggttgtgccgatcgcaaaagcgctgacggctaatgccagcagcgctggtaaatagctttggcgatgtgaagacatctgttttcctccttgaacgataatgtatggttgaaatgatgccgggtaaacgatataagtataagagtacattccttttcagccggcaaatgtcattatgatcgatagaagtgtcattgaaaagaacgtacttttaagtgccataggcactttttagttcctatagatgaggaggaattaccgttgctgaagaaaaaatacaatatatccgtagaggcggcgcttgaagtgatcggaggaaaatggaagtgtgtgatcctctgccacctcatgcgcgggaaaaaacggacaagcgaattgaagcggcttatgccggacatcacccagaagatgctgacacagcaattgcgggagctggaagctgacggcgtcatcaaccggatcgtgtacaatcaggtgccgccgaaagtggaatacgagctgagtgaatacgggcacagtctggaaagaattttaaacgcgctgtgcgactggggcgcgatgcatattgctaaacggtacggcgaggtgtcctccgttttagaggacagcattttaaatgacaaatttaaagaaccgggacaaatataagaaaaaagcaggcagcctgagacgctgatcctgctttttttatggaagaaagatcattttatatgcaaaaaaaccgattgaacaacatattgatcggtataagggtggatttttatcaagttgtactggcggatttcttttaatgtgttatactatatataaataaaagtaaattagagtggcatattaaaaaggggtgacctgagcatgaaggtaaaagtagcaatcaacgggtttggaagaatcggaagaatggtgttcagaaaagcaatggaagatgatcaaattcaaataacagccattaatgcaagctatcccccggaaacgcttgctcatttgataaagtatgacacaattcacggcaaatacgatcaagaagttgagacctccgacgacagtctgatcgtcaacggaaaacatattatgctgttcaatcgccgggacccgagagagcttccgtggaaagaatgcggaatagacatcgtcgtagaggcaacggggaaatttaattcaaaagaaaaagcaatgagccatattgaagcaggggcgaaaaaagttattttaacggctccgggcaaaaatgaagacgttaccattgtcatgggagtaaatgaagagcagttcaatcccgatgaacatgtcattatttcaaatgcatcctgcacgacaaactgtcttgcgccggtcgtcaaagtgcttgatcaggaattcgggattgaaagcggcctgatgacgactgttcacgcttacacgaatgatcaaaaaaatatcgacaatccgcataaagatctgcggagggcgagagcgtgcggagaatccatcattccgacttctacaggcgccgccaaagcgctgtcgctcgtgctgcctcatttgaaaggaaaacttcacggtcttgctttgcgtgttcccgttccgaatgtgtcattagtggaccttgtctgcgatctgaaaacagatgtgtcggccgagcaagtgaacgccgctttccaaagagccgcaaaaacgtcgatgtacggaattcttgattattcggatgagccgctcgtttcttcggattataatacgaattcacactctgcgatcatcgacggactgacaacgatggtgatggaagaccgaaaagtaaaggtgctcgcttggtatgacaatgaatggggatattcctgccgggtcgttgatcttatccgtcacgtcgccgcgcgaatgaaacacccgtcagctgtgtagactaaagatcatggacatttgttagaaaaaaacccttaacggcatattcgcaaaaaacacaccttgcaaaataaacttaaacacagtatactatctttcgtgaacttcttgctcgtgactgcttcggaattacttaaagggttaggacctctccggactaactttcccccgtggtaaatggccgggtcagttctcggaaattcacttttttaattcttgttaaggggggtccatgattatggaaacaatggggcgtcacgtcatctccgagctgtggggatgcgattttgataagctcaatgacatggattttattgaaaaaacgtttgtaaatgctgctttgaaatcaggagctgaagtgcgcgaggtcgcatttcacaaatttgcaccgcaaggcgtaagcggagtcgttatcatctctgagtcacatttaacgattcacagttttcctgaacacggatatgcaagcattgatgtttatacttgtggagacctggatcctaatgtggctgcggattacattgcggacgcattacatgcagatacaagagaaaacattgaaataccgagaggaatggggcctgtacagattaaacaggcacaagcgaaagtactgtaattttcaaaacgcaaacacaagggagctaagctgaaaaagccattacgcgctttgaagctgatgctccttttctaatgtaaaaaaacagcattgctttttctttaagcattttttttgtaaaatagaaaagataaggccggtctatcggctctcccaacaaataggctcatcctagaaacgttggcgggcatttaccggaagcttgcgaaccgcattacagcaacgaaacagatgggagctgatccaatttgaaatgtccttcatgccagcataacggttcccgcgtacttgattcacggcctgcggacgaagggaaatcaatccgcagaaggcgggaatgcgaagcctgccattaccgcttcactacatttgagaagtttgaagagatgcctctgatcgtcgtgaaaaaagaaggcgtccgggaagaattcagccgtgaaaaaatgctgcgcgggttaattaaagcttgtgaaaaaaggcccgttcctttaaaaacattggaagacatgtgctttgacattgaaaaagagctgagaaaccaaggtgtatctgaagtcaaaagcgaacttgtcggagaaatggtaatggaccgtctggcgaaaatcgatgaggtgtcttatgtccgctttgcctccgtctaccggcagtttaaggatataaacgtgtttatcgatgaattgaaagatttaataaagaaagaacgctgagagagctaagagattgtgtctggctcttttctcatgagcaaaattggcatttgatagatcgcagaaacggtgtaaaatgagagtagaaacatatcggaaggtttgagaatcatggctgactattggaatgacgtattgcctgtagatccttatacggtcaaaagccgttcgcttcttcaggatgtcgacagacaggttttgacacatctgtaccagccgctgatcggttcttttgcattctccctttatatgaccttatggggggagcttgagcagaaccgcttgtggggagcggaatccacgcacaggcagctgatgggcatgatgcagtcaaatttaaaaaagattcatcatgaacagggaaagcttgaaggaatcgggctgctgaaagtgtatatccgggagtccgagcaaaaagagcggatgtttatttatgagctgctgcccccgctcagaccgaatgatttctttgaagacggcatgctgaatgtctttctttataacagagtcggtaaaacgaaataccagcagctgagacaattttacacgcatccttccgtcggcgcgggtgcaagggaaattacccgtccgtttaatcacgcctttgcctcttttcagccgagcgaatggaaaatgacgcctgatatggaagaagcgatgaagctccctgaggactatgagacggcgtctgtcggacaagcgccttcctatacggtgacggaggaagtgtttgattttgagcttttcatggcgggactgtcagaaacgatgataccgcgcaaatcaatcacgcaggatgtgcgggagagcattaaaaagctttcatatttatacggaatagatcctatctccatgcagcacgtcgtcatgaccgcaattaatgaacaggatacgataacggccgaagcgctgaggaaagcggccagcgactggtaccaaattgaaagaagcgggaagcttccggaactgattgataaaacacagcctgtcaccttgagagaaaaccggacggaaaaggacgattcattgaacggcgaactcatcgcacagcttgagaccatatcaccgagaaagcttcttcaggacattgcggacgggaccgagccgtcaaaagccgacttgcagattatcgccgatattatgttcgaacaaaagcttgagcccggcgtcaccaatgtgctgatttattatgtcatgctgaaaacggatatgaagctgtccaaaaactatatccaaaaaatcgccgcccactgggccagaaagaaagtcaaaacggtacgggaagcaatgaagctcgcaatagaagagcacaggcaatatcttgattgggcggacggcaaaacaaacggcgcggcgcgcggcaaaaaaaccgtccgggaagaaaagcgccctgattggatgaaagaagaagaaaccgggaagaaacaagaacagccggctctttccgcgcaggatcttgaagaacagaagaaaaaaatgatggaagaaatgaaaaaactgaaaaaatactctgcctattgagacagagaagcggggtgatattgaatggaaccgatcagccgatccttagaaggcgtgacgaaaagacctgactttcaaaaacgcctggaacgaatgcagcagcaagtcatggccgacgaagacgtccaggcttttttgaaggaacagaaagatgtaatcaatcaaagcatgattgacagagggttaaataaactgtacgaattcgttcagcaaagcaaacagtgcgccttctgttcgaaagacagccggacgaacagcctgcttgaaggctatcatccgaagcttgtgatcaacgggcgttccattgatattgaatattacgaatgcccggaaaagagaaagctcgaccgacagaaaagacaaaagtccctgatgaagagcatgtatatccagcaggatcttctcggcgcgacgtttcagcagatcgacattaccgatccgagcagagtcggcattttccagcatgtgacggattttctgaagagctataatgaaacgggaaaaggcaaagggctgtacctgtacggaaaattcggaatcggaaagacatttattttagccgccattgctaacgaactggcggaaaaagagtattcatcaatgatcgtatatgttcccgaatttgtcagagagctgaaaaactcgctccaggatcagtcgttggaggcgaaactgaatatggtaaaaacgacgcccgtactgatgcttgatgacatcggagcggagtcaatgacaagctgggtcagggatgaggtcatcggcaccgtgcttcagcacagaatgagccagcagcttcccactttcttctcgtctaatttttcacctgacgagctgaagcatcattttacgtattcacagcggggagaaaaggaagaagtaaaagcggcaagactgatggagcggattttatatttggcttcgcccatccgtcttgacggggaaaaccgccgccgttcatgatgccggcgtccaatgggaaggatttgagggaatgaggaataagaaggctgtcacttgggctgcggctgcggcgggagcgggccttttgctgtgggcaaaccgcaaatatctgaatctgtcgcctaaggagatccggctgtgggtattatcgttcggtatttttgcgccgcttgtgtttatcggaatttccatcgtcaggccttttgtgctgtttcccgtatcaatcgtttccgtcgccggaggattggcgttcggcccgtttttcggcaccgtgtatacgctggcgggctcaatgggcgctgccgccgcgtcattttttgcggcggggctgtttgcctttaatgagaaaagccgtcatggaaaaatggaagccattcaaaagcagatgaaaaccaatggcttcttttatatttttatcctgcgcattctgcctgttaactttgatgtgatcagctatgccgcgggcctatcgaaagtcaggccgatgacgtattttttggcgaccgcagcgggcatcattccggggacgatcgtcctgaatgtgctcggcgcgagctttatgtccggcaatgtgctgaccgtactctgcgtgatctgtctttacatcgtatttttatcgcttcccgttatatttaaaaagaaggtgcgccatttgttcggcggtgaaagctaacctttacgtctattttaaaaacatcccccatatacttgtaacagatgccgtaaggggggacaaatatgcttgaagtgatctttgaagatgaccacgataccgccgcttttttacatctcattcagcaatcggacgaccggagacattttattgtccgtgaagacataaaaaaagtcggaatcgcaaggtctgaaacggctttttgcgttcagcgctttattgagccgatacttgtcaggttttttttggaatgcaaagaagacgagcatatgctttcgcttattgaggatgcatactgcttcaccgatcaggatgaacagcagcaaatccttcagcttgcacacagcattatggaaggagagttggatgatcatccgttcgagccgaagaaagagccgcgcacacagtttatttcagatgcgctccggacgatttcacttgatgcgggtgttttttccgtgcgttcgtttcagacgttccggctcggcaggtattatgagcggctcagagaatacgcggaggctgcgatagatgaataccggatggaacaggaatatcaaaactttatccagtctctgagagattatgtgacatccaatccgccgcggatgaagaaagtccgcatcgtacatgaccgggcttttacgctgtgggagctgcgctatttgtcagaacgggaacagaaaaaatacatagacagacggtttgtgcgggagcacccgatgtatatagattcccatctccttgcgccgctgatctccattgcgcctgagacggtagaactgtatacggacaaaccggagcatatgatgtccagaacgattcaaaacgtgtttcaggagagggtgcgcctttttccgctgggcgcgtttgcagccgagaagacggaaggatagccgcacggacggccttgtgtaggcggcagggctgtctgtgcgaaatcagacggaaaaccgagttgcatttttctcgcagacattttataatacataaaagattaatgattgctacacgtattgataaggacatgaagcattgataccggctttataagagaggagagccctaggctgaaagctttccagctatggatcattgtctttaccgcctttgaacttcagctgtgaacgccggaagaagcgccagtaatagctgacgggaactcccgttacagagtttagagccgcaggtgccgaaacaatcggccgcgcggaaaaaagggtggaaccacgattccgtttatttaacctcgtccctttcatagggggcggggtttttgatttgcataaaaaaaggagtgacgaagatgtcagatatgatcaacatcacatttccagacggagcggtaaaggaatttccgaaaggaacaacaacagaagatatcgcggcatccatcagcccgggattaaagaaaaagtctttagccggaaaactgaacggacaggaaattgatttaagaacgccgattcaagaggacggtgccgtagaaatcattacagaaggcacagaagaaggtttgaacatcatgcggcacagcacggcgcatttattggcccaggcgataaaacgcatttataaagatgtgaaattcggagtcggccccgtcattgaaaacgggttctattatgacgttgaaatggagcaggcgctgacgccggatgaccttccgaagattgaaaaagaaatgaaacgcatcgtcggtgaaaatctgccgattatccgaaaagaagtgagccgtgatgaagcaaaagccatgtttgcggaaatcggcgataatctgaagcttgaactgctggatgccatcccagaagacgaaacggtctccatttatgagcagggcgaattttttgacctctgccgcggcgtgcacgtgccgtctacaggcaaaattaaagaatttaagctgctgagccttgcgggcgcatactggcgcggcgacagcaaaaaccaaatgcttcagcgcatttacggcacagccttctttaaaaaggatgacttgaaagagcatttgcggatgcttgaagaagcgaaagagcgtgaccaccgaaaacttggcaaagaattaaaattgttcgccaactctcaaaaagtcggacaaggcctgccgctctggctgccgaaaggcgcaaccatccgccgcgtgatcgagcgctacattgtggataaagagctgagcctcggttatgagcacgtctatacgcctgttctcggaagcaaagacctgtacgaaacatcagggcactgggaacattatcaggagggcatgttcccgccgatggaaatggacaatgaaacactcgtgctccgtccgatgaactgtcctcaccatatgatgatttacaaacaggacattcacagctaccgcgagcttccgatccgcatcgcagagctcggaacgatgcatcgatatgaaatgtccggggcgctttcaggtcttcagcgcgtacgcggcatgacgttaaatgacgcgcacattttcgtccgccctgaccagattaaagaagaattcatccgcacggtccgtttgattcaagacgtatacgaagacttcggcctgagtgattacacattccgcctgtcttaccgcgatcctgaagacacggaaaaatattttgatgatgatgagatgtggaacaaagcgcaatccatgctgaaggcggcaatggacgaaatcggccatgactattatgaagcggaaggcgaagcggcgttttacggccctaagcttgacgtgcaggtgaaaacggcgatcggcaaagaagagacattgtcaactgtacagcttgacttccttcttccggaacgctttgatctcacttacgtcggagaagacggcaaacagcaccgccctgtcgttattcaccgcggcgtcgtgtcaacgatggagcgtttcgttgctttcttaatcgaagagcacaaaggcgcccttccgacatggcttgcgccggtgcagttccaagtcattcctgtatcaccgtccgtgcatcttgactatgcgaaaaaagtgcaggagcgcctgcagcgtgaaggcctgcgtgtcgagcttgacagccgggacgaaaaaatcggctataaaatccgtgaagcgcaaatgcaaaaaatcccgtacatgcttgtggtcggtgaccaagaagcggaaaacggcgcggtaaacgtccggaaatacggcgagcagaaatcagaaaccgtctcattggacgattttgtgaaaaaggctgtagccgaagcgaaaaaataaccagaaatacaaaaaaccccgttcatccagaatggggtttttttgcgtataaaattatctttctttttgtttctctataattgcaaacagctcgtgaagatcgctgatcacgtaatcaggcgcaatgtccgtatcatttttcttttgcgtccggtttacccagactgtcgtaatgcctgcccgtttcgctcccaatatatcagtattgaggttatctccgaccataatggcgtcttcttttttcaggttcaggaggccgaggcaatgttcgaatatggaggcgtcgggtttcccttttccgaaagcgcctgagatgacgatttcattaaaataaggcgcgagctcaggaacgccggcgagtttttctttctgcaggctgggatcgccgtttgtcagcagaagcaattcataaacacctttcagcttatcaagcactgcaaacgtttcatcatacacgtacggacgctgtctgcgttccgccgcgaaaaactccgccaaatattcgccgtaagccgcatcgtctataccgacactttttaagccgttcgtccaggcgtttcgtctgtattccggcgcaatccgattcagctgtttaaatccttcgctgaccggctcggaaaaattcgcccataatccttcaaacggattaatgccgatcatgaccgtataaggataggtttcgtatgacatatacaattcccgtgccgctttccgaaccgcctcttcaaatgtatgcgggtcaaggccatattttttttccgcttgtaaacatgtttctctgaatgttgttctgacgcttttttcatcccataacagtgtatcgtccaaatcaaaaaatacggctttcatgatcttctcctctttgttatattctgaaactctctgccgcaaggctcccgtttattctacaatagatatatagactgtgaaagatttgttttcagatgatttgaaaaaaacaggcaggtttgtgtcagattctgtctcaggctctaaaacgtgataaaataaaatttgaaagaacaggtgaaaagtatgctgcatttgatcatcatgatgctggaaagagtcggaatcatcgtcatattgggatttgttctggctcataccagattgttcagacaggcgctccagcagcctgaaagctataaaggcaaagcggtgctgatttcaattttctcgctgttcagtatcatcagcaactatacgggaatagaaatccagcggaatacaatcatgaataatgactgggtgtttcaaattaatccgtccggttcaattgccaatacaagaattatgggcgttgaaatcggcggactcttaggcggcccgtatgtggggatcggcgtcggcatactggccggcctgcatcgtctatcacttggcggcgcgaccgcagtcagctgtgccgtctcatccgttttagcgggcattttatccggctggatcggacggtatttcagaaaacgctatgcgatgccgacaccgcgggtggccgcgcttgtcggactcgggatggaatcactgcaaatgctgctcatcctcttgatggccaagccgttttctgatgcttggacgcttgtgagcatcatcggcatcccgatgatattggtaaacgggtcagggacttttatttttctttcgatcattcagtcgattatcaggaaggaagaacgggcgagagcccttgaaacccatagggtgctgatgattgccgatcagacgcttccgtttttccgccaggggttgaatgaaagctcatgcaaaagcgtcgccgccatcatccacaggcaaacaggaacggacgcggtatcgcttacggataacgaaaagattttggcgcacgtcggcgcgggtgccgaccatcatattccgtctgaaagcctgattaccggattgtcaaagcgcgtcattaaaacgggtcatattatgaaagcgacatcaaaggaagaaattgaatgtacgcacgatccttgtccgctgcatgcggcgattgtattgccgctgacgtcaaacggcaaaacgatcgggacgctgaaaatgtactttaaaagcccgtcaggtttaagccgggttgaagaagagcttgcagaaggactcgccatgctgttttccacccagcttgaactcggcgaggcggaactgcagagcaaattgctgaaagacgcagaaataaaggcgcttcaagcacaggtcaatccgcattttctgtttaatgcgatcaatacgatttctgctctttgccgtacggatgtggaaaaaacccgaaagcttctgctgcagctcagcgtctatttccgttccaatctgcagggggcaaggcagctgctcatcccgctttctaaagaactgaaccatctgcaggcatatttatcattggagcaggcccgttttcccgggaaatataaaatcagccttgaaatcgaacgcggtttggaggacatcgaaattcctccttttgtgctgcagatcctcgtcgaaaatgcgctccgccatgcattttcaagaaagcaggacagctgtgccgtcaatgtcagcgtggtatccgccggtcaatcggttttaatgcgggttggagataacgggcggggaattgatccggaattgctgtccgtgctcggaaaccgtccgctcccgtctaaagaagggacgggaaccgcgctttacaatttaaatcagcggctgatcgggctgttcggccccaaagcagccctgcgattggaaagtgaggccggcaaaggtacggacgtatcatttgaactgcctttgaaactgatgactaaaggagaagaacatgctgaaggtgttaatcgttgatgatgaaatgctggcaagagatgaattagcttatttgctgaaacggacgaatgaagtaagtgacataaacgaagctgaaaatattgaatccgcttttgacagtatgatggatcaaaaaccggatctgctgtttttggacgttgatttgtcaggagaaaacggatttgacattgccaaacggctgaaaaacatgaaaaatccgccggctgtcgtttttgcgacggcgtatgaccaatttgctttaaaagcctttgaagtcgacgcgctcgattatttaacgaagccttttgatgaagaaagagtgcgccagacgatcagaaagtttaaaagagtgaagcaggacagggcaggaggcgtctcagagcagccgtccgcagccggagcgcataaactggctgtatcagccggtgaatctattgtcattttagatacgaaggacattattttcgccggcatggaagacgggcacgtttccgtcaaaacgtttgccgcgtcttattccgttcatgaaactttggctgtcattgagaaaaaactgcctgagacgggtttcttgagagtgcaccgcgcgttcatcgtgaatacggagcatattacggaaattcatccttggtttaattcgacgtacaatcttatcttaaaagacggctctaaaattcccgtcagccgtacatacgccaaggacttaaaaaagctgcttcatattatatgaggcggcttttgcatttcagcagccgttttttgcatttcagaatgaatattcagccgtttattatgaaagcgctttaaaaatcgatttctcttttataatggacctaacaaagagaaagaggtgaagaaaatgagtgcgaaaaaagtgtacggatttctgacacaagcatttatttttgccgtaattatgctcatatctaatgggattgcagcgattgtccccattcctatacccgcttccgtagtaggtttggtgttattatttgtcctcttatgtctgaaagtgattaagcttgaacaagtagaaacgctgggaacatcattaacgtcactgatcggatttttatttgtcccgtcgggcatctccgtgatgaattcacttggcgtcatgcagcagtacggcgtgcagatcgcactcgtcatcttactcgccaccatcattctgttaggggcgacaggccttttttctcagctgatcttgtctgtcagccaaaaacgtcagaagactgctcctgaaaaacaaacggtgcgccgttccaatcaggaaaaagaacttgtgcagcattaggagggaaatcggatgagtccatatttcggtattgtcgtttcacttgcggccttcggcatcggcacgtatttatttaaaaaaacgagaggctttttcctcttcaccccgctgtttgtcgcgatggtgcttggaatcctttttctgaagctcggcggtttttcatatgaagattataaaaacggaggagacattattaaattcttcctggagcccgcgacgatcgcttttgccatccctttatacaaacagcgtgacaaactgaaaaaatactggtggcagatcatgtcttctatcattgtcggctctatctgctcagtgacgattgtctatttgatcgcaaaaggcattcatcttgacgcggccgttatgaaaagcatgcttccgcaggcggcgacaacggcaattgcccttccgctgtcaaaagggatcggcggcatcaccgacatcaccgctttcgccgttattttcaacgccgttatcgtctatgctctgggcgctctattcttaaaactgtttaaagtaaagcatccaatctctaagggactggctctcggcacatcaggacacgcactcggtgttgcggtcggtattgagatgggggaagtagaagcggcaatggcaagtatcgcggttgtcgtcgtaggagtggtgacggtgctggtcattccggtattcgttcagctcatcggaggataaacccgggtcatagacccgggttttttattgtccggcagcatctgcgggcggcaaagtacgaaatttcacatttttccttgcgctcaccccggcatcgtgttaaaatgaaaaagttgatccggagaagtcattcttgactaatgatccggtattgtgtagaatagttattgaattgaatataaatcacaagcagaggcacccgcttctcacctgattgacacattcatgtagttggcaggttgaccgtacatttttatttatgcagatgttcgtagtgtgggtgtgttgtcatgcccgcactttttgtttgcctgcagaatgcagtcaaaaagcgttgtgaatcaattcgaagaaactatggaggtggctcattattagcaaagatcaattggttaatgagggtatccgtgcacgtgaagttcgtctgatcggacaaaatggcgatcagctcggcatcaagtcccgtcaggaagcacttgaaatcgccggccgcgcaaatcttgaccttgtgttagttgcagcaaatgcaaaaccgcctgtctgccgcatcatggactacggtaagttcagattcgagcagcagaaaaaggacaaagaagcacgcaaaaatcaaaaaatcattaacttaaaagaagttagattaagtccgacgatcgatgagcatgactttaacacgaaattgcgcaatgcgattaaattccttgaaaaaggcgataaagtgaaagcttctatccgctttaaagggcgcgcaatcactcataaagaaatcggccagcgcgtattggaccgtttctctgaagcatgtgcggaagttgcgacagtcgaaacaaaaccaaaaatggacggccgcagcatgttcttaatgctcgcgccgaaaaacgaaaagcaataaggaggaaatcccatgccaaaaatgaaaactcaccgcggatctgctaaacgttttaaaaagacaggttctgggaagttaaaacgttctcatgcatatacaagtcacttattcgccaacaaatcccaaaagcaaaagcgtaagcttcgcaagggtgctattgtaagcgcaggagacttcaaacgtatcaaacaacagcttgctaacatcaagtaatcggacaaggaacaattaggagggaaatataatgccaagagtaaaaggcggaactgtgtcgcgtcagcgtcgtaaaaaggttcttaaattagcaaaaggttatttcggttcaaaacatagattatacaaagtagcaaaccagcaggtcatgaaatcaggaaactatgcattccgtgaccgccgtcagaaaaaacgtgatttccgtaagctttggatcactcgtatcaacgctgctgcacgtatgaacggtctttcttacagccgtttaatgcacggtcttaagctttcaggcatcgaagtaaaccgcaaaatgcttgctgatcttgctgtaaacgatcttactgctttcaatcagcttgctgatgctgctaaagctcagttagacaagtaagttgaaaaagccgctctctttccgggagcggtttttttacgtaaagggtgacaatcaatggctctcttcatttacgccgtattgataaacggatacggcttttggatcatgggcgctgataaaagaagagcaaaggcgcacaggtggagaatatcagagaaacgaatatggctcacagccgccatgttcggctcactcggcgtatggatcggcatgcgcaccttcaggcataagacgaaacacaaatcctttttatacggggtgccgctgctttttctcactgaagccgcccttgtgctgatgtatttgatgtataaaacataaaagcaggagagcttatcgctcgcctgcttttttcgcttttttgatgggctggtcccaatcaatcttgcaattcggataccgctccaatacctttttttcgacttcttcaaaatcacctgcagaaaagcggttcagcttttccggattttcggtccatacaaatattgtatggataaacagcggatgatctttggaagggatatgcttttctccttcaaagagcacccctttataagtaagctggagattttttcgcgtgtttttctgttcgtcaataaaataaaaattctcttttgattgtgccagtctgagccttcttttcgggtttgcgtagaatttgatgcacatgtaaataaaataaataagaagtgcaagcaagacaatcctcaatactgtaatggccatatgtgtgaaggcacctcctcacctttgtcatgatctgatgtaatacgaaaaacaaaacaaaaggtttcatttttttaaaagaaatagataaaaacatttacccgtttttcaggcgaattaatcgtatgcttcagcaatggttttgtataataagaagggtagtgaaaaaaaggaggtttattgatgacaaaattagatgaaacgctcaccatgctgaaagcgttaacggatgcaaaggggataccgggaaatgagagagaagtaagacaagtgatgaaatcatacatagaaccatttgccgatgatgtcacaacagaccggctgggaagcttaatcgccaaaaaaaccggcaaagaaaacggtccgaaaatcatgatctcagggcatttagacgaagtcggttttatggtgacgcaaatcactgataaaggctttctccgctttcaaaccgtcggcggctggtggtctcaggtcatgctggcccagcgcgttaccgtcgtgacaaaaaaaggggacatcacggggatcatcggttcgaaaccgcctcacattctgcctcctgacgccagaaaaaaagccgccgatattaaagagatgttcatcgatatcggggcgtccagccgtgaagaagcaatggaatggggcgttcttccgggtgaccagattgtgccgtattttgaatttacagtgatgaacaatgaaaagcatttattggcgaaagcatgggacaaccgtatcggctgtgcgattgccatcgatgtattaaaaaatctgaaaaacagtgatcaccccaatgaagtatacggggtcggaaccgttcaagaagaagtcgggctgcgcggggcgaaaacagcggcacatacgatccagcctgatatcgcgttcggtgtggatgtcggaattgccggagatacaccgggaatttctgaaaaagaggcgcaaagcaaaatcggcgaagggccgcaaattattctgtatgacgcatcaatggtatctcacaaagggctgcgcgaccttgtcgtgaacacggcggaagaagcgggaattccgtatcagttcgattccattgccggagggggcacggattcaggttccattcatttaaccgcaaacggagtgccggcgctgtccattacgatcgcgacgcgctacattcacactcatgccgctattttgcatcgggatgattatgagaatacggtaaaattgatcacagaagtgattaaaaaattagaccgggaaacggttgaccgtattacttatcaataaagatacggaagaatctgcttttttaagcagattcttttttttgtctgtacaaatatgaaccctgcgtctacaataagagaagacatagaaaaatctgacaacacgtttttgaaagcgctttaaaaaagggagggtttacaaatgaaaaacagattcagacgcatgatccgcttttcgtgcgcagccgttacagccgggctgctgctgatgtcttcatctccggcatctgccgcgttttggggggcatcaaatgaattgcttcacgatccgacaatggcgaaggaaggaaacacgtggtacgctttcggaaccggtttggaaggggagagggggcttcgcgtcttaaaggcgggcagcggcggcgtatggaccgttcagaaatcaatctttacttctccgctgtcatggtggggcaattatgtgccgaattacgggctgaatcaatgggcccccgatgttcaatattttaacggaaagtattggctgtattatgccgtttcttcattcggcaaaaatacctccgcgatcggccttgcatcatctacaagcctcagttcgggaaactggaaggacgaagggctcgtcatccgttcaacaagcgccaataactacaatgcaattgatccggagctgacaattgataaagacggaaacccttggcttgccttcggttctttttggagcggcattaagctgacaaagcttgataaaaatacaatgaaaccgacgggatcactttattccatcgctgccagaccgaataacggcggagctttggaagcgccggcgatcacctaccagaacggctactattacttaatggtgtcgtttgataaatgctgttcaggcgtgaatagtacgtacaaaatcgcttatggaagaagcaaaagcatcaccggcccatatctcgataaaagcgggaaaagcatgtcagaaggaggagggacgattcttgactccggcaatgaccgttggaaaggcccgggcggtcaagacattgtgaacgggaatattttagtgcgtcatgcgtatgatgccgaaaacagcggaattccgaagatgctcatcaatgatatcgattggagttcaggctggccttcctattaattgatcagccgggcatgtgtgtccggcttttttacttgcaataaaagattgacagtttgattcctccttaactataataaaattgttcgtacaaataaaaggattaaagttttgtagtttatattcatacgtatattttttaaaaaaatgcaagcgctttattttgatgggaaggggaaatgaatgtgcttcagaacaaagaatatgaattttggtttgtaacgggaagccagcacttatacggagaggaaacgctgcagcttgtcgataaacacgcaaagggaatatgtgacggcctcagcggggtgtcatcaagatacaagatcaggcataaaccggttgtcacgtcatctgaaacaatcagagaggttttgcgggaagcgcagtatcaagaaaactgtgccggggtcgtgacgtggatgcatacattttcccctgcgaaaatgtggattgaaggtctttccgcttttcaaaagccgatgcttcatctgcatacccagtatcatcgcgacatcccgtgggaaacgattgatatggactttatgaacagcaaccaatccgctcacggagaccgggaatacggatatatccagtcaagaatggggcagacgagaaaagtcatcgcaggctattgggatgatgaggaagtcaaacatgacatttcgcaatggatgaacacggctgccgcttggaatgaaagcaggaatattaaagtagcccggttcggcgataatatgcggaatgtggcggttactgacggagacaaagtcggcgcccacattcaattcggctggcaggttgacgggtacggaatcggcgatcttaccgaggtgatgaacaacgtcaccgacgcagaaattgaggcgctttatgaggaatacgacaacttgtatgtcatcagcgacgaaacaaaacgggatgaagcaaaagttgcttccattaaagaacaggcgaaaattgaactcggattaacggcctttctcgaacggggcggatatacagcgttttcgacctcgtttgaagttttgcacggaatgaagcagcttccgggtcttgccgttcagcgtctcatggaaaaagggtacggatttgccggcgaaggcgattggaaaacggctgcccttgtgcgaatgatgaaaataatggcggacggagaacaaacctccttcatggaagattatacgtaccattttgaaccggggcgtgcgatgattctcggatcacatatgcttgaagtatgtccgacgatcgcccttgatcagccgaaaatcgaagtccatcctctctcaatcggagggaaggaagatccggcccggttggtctttaacggaatcggcggttcagccatcatcgccagcatcattgatatcggcgggcgattccgtctcattctgaatgaagcggaaggcagggaaattgatcatgatatgccgaatctccctgtggcgcgggtgctgtggaagccggagccatcgctgaaaacagctgcggaagcatggattttggcgggaggcgcccatcatacctgtatgtccttccggcttacggctgaacagatgcttgactgggctgagatggcaggcattgaaagcatctttatttcccgcaataccgaaatacatgagctgaaaaaagagctgaaatggaatgacgcattataccggctgggagggaattaatatggcgtatacgattggtgttgatttcggcacattgtccggccgggcggtgcttgtcaatgtccgcacgggcgaagaaatcgcgtctgcggtaaaagaatatactcatgctgtcatcgaccgcacgctgccgaagacgggtgaaaaacttcctcgggactgggcgcttcagcatcctgccgattatatcgaagttctggaaacggcgattccgaacctgcttgagcaggcgggcgctgatccaaaagacgtgatcggcataggaattgattttaccgcctgcacgattttgccgatagacggcgcggggcagccgctttgtatgctgccggaatttgaacgggagccccacagttatgtgaagctgtggaagcatcatgcggctcaaaaacatgcagaccgtttgaacacgattgccgaagatacaaatgaaacattccttaaaagatacggcggtaaaatttcttccgaatggatgatcccgaaaatcatgcaaatcgcggaagaagcgccgcatatatacaaggcggcagatcagattgtggaagcggcagactggatcgtctatcaattgtgcggttcattgaagcgaagcaactgcacggccggctacaaagcaatctggaatgaggagacggggtatccgccggatcattttttcgaaaagctcaacccgttaatgaaaacgattacaaaggataaattaagcggctccatttattcagtcggggaaaaagcaggaggtttgaccgaaaaaatggcggagctgaccgggcttctgccggggacggccgttgccgtcgccaatgtcgacgctcacgtgtcagtgcccgcggtcggtattacagagccggggaaaatgctgatgatcatgggaacgtctacctgccatgtgctgctcggcgacgaagaacatatcgtccctggtatgtgcggggtcgtcaataacggcatcttgcccggatatgcgggatatgaagcgggacagtcctgtgtcggcgaccactttgaatggttcgtcaaaacgtgtgttccgagagactatgagaaggaagctgaggataaacacatagacattcacgagctgctcagcaaaaaagcagctgaacttgttccgggggaaagcggccttctcgcgcttgactggtggaacggaaaccggtcaaccttggtggacgcagatttgacgggcatgatgctcggcatgacgctgcacacgaagccggaagaaatctacagggcattgattgaagcgacagcgttcggaacgaggatgattatcgaaacgttccgggaaaacggcgttccggtcgaagagctttacgcagccggaggaatcgccgaaaaaaatccgtttgtcatgcagatttatgcagacgtcacaaatatggatattcaattatccgggtctccgcaggcgcctgcactgggctccgcgattttcggagcgctcgccgcgggacagggaaacgggggattctccaatattgctgaggcatgtgcgcatatggggaaattaaaagacggcttttatgccccgaaccgggaaagagctgagatttatgacagcttatatgcggaatataaagagctcgtacactacttcggcaaagaaaacaatgtcatgaaacgcctgaaagccattaaaaaccgtgattttgcgaaaggagggagccgccatgcttgaagcgttaaaagaagaagtgctcgctgccaacctgaagcttgaggaacataaccttgtcacgtttacatgggggaatgtcagcggcattgacagagagagcgggagaatcgtcattaaaccgagcggtgtcgattacagtgagctgaccgctgacaaactggtcgtcctgaatgaggacggagacattctcgaaggctcgctgaaaccgtcttctgacacgccgacccatctttatctgtataaagcgtttccggcgatcggcggaatcgttcatactcattcccgctgggcgacgagctgggcacagtcaggaagagacattcccgctctcggaacgactcacgcggattactttgaaagcgctataccctgcacgagggaaatgtatgaagaagaaattgtgaaagattacgaatatcatacaggcaaagtcatagccgaaacctttcaaaacgaaccgtatgaacaaaatccgggtgtcctcgtccacagccacggcccgttctgctggggaacggacgcgctgaatgccctgcataacgccgttgtgctcgaaacggtagcggaaatggcctaccattcgcttatgctgaacaaacagctcagtccgatcgacagagtgctgcatgataagcatttttacagaaaacacggggcgaatgcttattatggccaaacttgacgcggccgggtttctgattgatttagacggaaccgtattcagggggcgggagctgattgacggcgcaaaagaagccgttcatacccttcagtcactgggcaaagccgttgtctttttaagcaaccgcggcaatctatcaagagcaatgtgccgaaagaaactgctgggtgccggtatccgcacggatgaacggaacatcgtgctgtcctccagtgtgacggcatcatttttaaagaagcattatcctatgtcaaaggtgtgggtgttaggggaaaaagggctgactgatgaactcgctttagcgggtgtcgccctggcgaaaaaaccgcaggcagccgactggcttgtcatctccctgcatgaaaccgtcacctacgaagatctgaatctcgcttttaaggcggcttcctccggcgcgcgcatcatcgccacgaaccgggaccgctcctttccgaatgaaggcggccatgccatggacgtcgcgggaatgatcggggccattgaagcatccgccggagcaaaaacggagcttgtcatcggcaaaccgtcttggctgatggctgaggcggcatgtgaagcgcttggacttccccctgaggaatgcgccattatcggagacagcctcgaatctgatatcgcaatgggcaggctgtacggaatgaaaagcgtattggttctgacggggtcggccaaacttggggagccccgtctatatgaacctgacatcgtccttgattctattaaagacctgacaggattagcgaaggagggaatccttttatgaaacgttctcctgaggacattcaatccgagtttgacaaggaaggggccagccgctcaccgattcaaatagaagatatcgtgatcggggcgaatgcaaaagaagagcttctcagatttctgcaaaaaaaatgctggaatcatccggtcatcgtctgtgaccggaacacgtacgaggcggcgggacgtctgcttgcggacgaattgagggcaggcgggatcaaagcgtcaaaagtcatcattccggagcatgaagccggggccgccgcggctgatgagaggacattggtctatacgctgatcaatctcgcggaagagacggatgtcatcattgcggccggttcaggaacgattcacgacattacgcggtttgccgcctgccagcgcggattgccgtttatctcattccccaccgctccgtcagtcgatggttttacatcggcgggagcgccgctcatattaaacggaatcaaaacgacgattcaaacgaaagcgccgatcgccttatttgccgatacgaatgtattaaaagaagcgccccgttcaatgacagctgcgggcttcggagacatgatcggaaaaataacatcgctggcagattgggagatttcccgcaggcttgcgggtgagccgtactcagaagccggggcgaagcttgtgaaagacgcgctttggcagtgcattgatcaccgcgctgacattgccatgggaacggaggccggcattcagatactgatggaagcgctgatcgtttcgggtcttgtcatgcttgcgcttgaccactcccgccccgcctcaggaggagaacatcacatctcgcattggattgagatggaaatgctgaaggcaaaacagcctccgattctccacggtgcgaaggtcggctgtgcgtgcgcggtgttgagtgatatttacaaagaactggcttgtcacgaaaagcttgctgaactgccgccgcactttcgcgaggcgattcattctgcatatgaagggcttcccgacggcaagacaattgccgggtggctcgcatctgcgggaggtcccgcctgtttcgatgagatcggtgtggaaaaggagcttgtcagcgatgcgcttaagcatgcgcacacattgcgggaccgttataccggtttaaccatcataaatgaaaatgcagcgctctttgcacatcatttgcatctatagccgcacggcctaaagtggaaggggtaatgacatgaaaaaaacgaccgctgtatgtttggtgctgatgatgctcttcgtgtttaccgccggctgttcacaagaacggactgccggccggccgggagaaacggagctgacgttttggacgtttaacggtctgcacgaacagttttatcaggaaatggtcaaagaatggaatcagaaatatccggagcgcaaaatcaagctgaataccgttgtttatccttatggacaaatgcatgataatttatcggtttcgctgatcgcgggtgaggggcttcccgatatagccgacgtggaattaagccggttctcgaactttctgaaggggaaggatatcccgcttgccgatctgacgccgctgattgaaaaagaccgcgataagtttgtggaagcgcgtctggccttatacagcaaaaacggaaaattgtacggccttgatacacatgtggggacgaccgtcatgttttacaacatggatatcatgaaaaaagcgggcgttgatcccgcctccattaagacttgggaagattaccggcgggcagggaaaaaagtgcgtgaagccgcggggaaaccgatgggaacggttgaaacaaacgactccgccacattcctatccatgatttcgcagcaagggtcaggctactacagcaaaaacggaaaattgattctgaacagcaagacgaatacagacacactgaattatgtaaaggacatggtaaatgataaaacccttctgccggctcccggcggcggccatcacagcgaagaatactacggttttatgaatcagggcggggcagcctcagtgctgatgcctatttggtacatgggacggtttatcgattatatgcctgatttaaaagggaaaatggcgatttaccctatgccggcctggaaagaaggcggtgacagatcagcgggtttaggcggaacagccaccgtcgtgccgaagcaggctgaacatctgaatctcgcgaaagaatttctcggttttgcgaaaggttcaaaggaagggaacataaagctttggacggtgctcggctttgacccgctccgctgggacgtgtgggattcaaaagaattgaaggagaaaaacaagtacacggatttcttccggaacggtacgtcaattttttcctcgctccttgaaataaaagatgagatcaatccgatttatctgcatgaagacttctctaaagcggctgatcttgttgtcagacaagtgctgttcgatgcgttgaagacgcaggaaaaaacacctaaggaagccttggacgaggcggcagagcaattagagaaataggagaagccgccctatttaacagtgaaagcgggggagcttttatgagacctgtaaagacagagacagcgcaaaccgtttctgcagtccgggagaagccgcgccggcgcaatgtgctgtattcaaaaaaagcggcgccttatctttttacggcgccatttatcatttcgtttctcgttttctttttgtatccgattatcagcgtgtttatcatgagctttcagcggatactgccgggagaagttacatttgtcgggttttccaattataccgctcttcttaatccaaccttttacaccgcaatgtttaacacattggaatataccttctggacgctgatcgtgctgattccagtgccgcttcttttggcggtgattctgaattcgaagctcgtcaggttcagaaatgtatttaaatcggctctgtttgtaccggctttaacatcgacgatcgtagcggggattattttccgtctgatgttcggagaaatgaatacgtcgcttgcaaacgagctgatgatgaagcttggcgcatcaccccaaaactggctcaacaacaaaggtaccggcatgtttttaatggtgctgcttgcgtcatggaggtggatgggcattaacattctatactttctggccggattgcaaaacgtgccgaaagaattgtatgaagcggctgaaattgacggggcgagtacgtggaaaaagttccgtcatattacccttccatttttaaagccggtgtccgtttatgtgttaacgatcagtattatcggcggtttcagaatgtttgaggaaagctatgtgctttggcagaataattccccgggcaatatcggcctcacacttgtcggttatttatatcagcaggggcttgcatacaacgaaatggggtacggggccgcaatcggaattgtccttttgcttgtcatcctactagtcagccttgtttctctgaaactgtccggttcgtttaaaggggagggataagcgttgcgtaacaatcacatgttttccgtttacagagttgcgtttaccttgttttttatcatgctgagcctgttgtatatctttccgatgatctgtctattgctcggttctttaaagccgtcatctgagctgatgcgcatcgggctgaatctgcgtcttgatccggatgtgatgagccttgataactacacctatttgttcaacggggggagcatttatttcaaatggttttttaacagcctgctgctcggcgttcttaccacggttctcacgctgtttttttcctctttgatcggctacggactcggtgtctatgaatttaaaggcagaaatattattttcgttcttgtgctgatcattatgatggtgcctcttgaagtgatgatgcttccgttgttcaaattgacggtgggtcttcatttgatcgattcctatacgggagtgattctgccgtttattgtgtcgcctgtcgccgtgttctttttccggcaatatgcgctcggacttccgaaggatctgcttgattcagcgagaatggacggctgcaccgaattcggcatttttttcagaattatggcgccgctcatgaaaccggcattcggggcaatgatcattcttcaatctttaaacagctggaataactttttatggccgctgatcgtgcttcggtcgaaagaaatgtttacccttccaatcggactttcagggctgctgagtccgtacggcaacaactatgacatgctgatttccgggtccgtttttgcgatactgccggtgatcatcatattcttgtttttccaaaaatacttcatttccggcctcacagtaggcggagtgaagggatagagagagggaggaaataatgaaaaaagcggggattacagcagataaagaatatatcatcggtgaagtggacaaacggatgtacggatcatttatagaacatatgggccgggcggtgtatgaaggcatttatgagcccggacacccgaaagccgacaaggacggcttcagaacagacgtgcaggagttaatcaaggaattgcaagtgccgttcatccgctatccgggagggaattttctctcgggctacaattgggaagacggcgtagggccggtgaaggaccgcccgcggaggcttgatttggcatggcagacgacagaaacgaacgaagtggggacgaatgaatttttaacgtgggcgaaaaaagtgaacgccgaagtgaatatggctgtcaatctcgggacgagagggatcgatgccgcccggaacctcgtcgaatactgcaaccatcctgaagggtcgtactggagcgacttacgaaaatcgcacggatatgaaaaaccttacggcatcaaaacatggtgcttaggaaatgagatggacggtccttggcagatcggtcataaaacggcgcatgaatacggacggctcgccgctgaaacggcaaaggtgatgaaatggacggacccgacgatcgaattggtggcttgcggaagctcaaacagcggcatgccatccttcatcgagtgggaggccgaggtgcttgagcatacgtacgagcatgtggattacatctcactgcatacgtattacggcaaccatgaaaatgatcttgaaaactatttggcgaagtcgatggatttagaccattttattaaatccgtcacagccgtatgtgattatatgaaagcgaaaaaacgcagcaaaaaaacgattcacctttctttagatgaatggaatgtgtggtatcactcaaatgaagcggataaaaaagtggagccatggattacggcccggccgattctcgaagacatctacaattttgaagatgcactgttgatcggttcactgctgattacgatgctgcagcatgcggacagactaaagatcgcctgtctcgcccagcttgtcaacgtaattgcgcctattatgactgaaaagggcggagaagcatggagacagccgatcttttacccttacatgcacgcctctgtctacgggagagggacttcaatgaagctgctggtcacctccccgaaatacgactcagcggattttacggatgtgccgtatgttgatgccgcggccgtttaccatgaagaggatgaagcactgaccatttttgccgtcaacaaaagcaaggaactgatggaaacggagataaagctgagagggtttgaagattaccgcattattgagcatatcgtgctggagcatcaggatatgaaagcgaccaatcaaaaaaacagaaaagaagtcattccgcactccaacgggacgtcttccgcaaacgccgaaggaataacggctcattttacgccgctgtcctggaatgtcatccgtttatcaggaaaatagcgttccgaaaagccgggcttagccgccggcttttttttacgtaaaaatcatctactgttatctgataattgtgataatatttagaaaaagagaaaaggggctgggattaaatgaatgcgattacaatcgtcatagcgtctatatgtattttggcgatcgcctatcggctttacggtacctttatgatggtcaaagtattaaaaatcaatgatcagacaccgactccggcccatgtgcttgaggatgggaaagattatgtgccgacgaataagtgggtgtcattcggccaccacttcgcggcaatcgccgctgccggcccgcttgtcggaccgattctggcagctcagttcggctatctgcccgggcttttatggctgttaatcggagcggtgatcggaggagccgtgcacgatattgtcgtattgtttgcatcaatgcggaaaaacgggaaaacgctttctgaagtcgccaaagaagagctcggcccggtggcgggtttttgcacgggtctctcgatgctgtttatcattacgatcacgatggcggggctgtccatggttgtgctgcacgcgcttgagaaaaacccgtggggaacgtttgcggtggggattacgattccgatcgcgatgggggtcggcctctactataaaaaaacgggcaatctcaaactcgcatcaactgtcgggtttcttttgttaatggccggtgttgtcatcgggccgcggctgcagacaacggctctcggggacatgctgacactggatgcgaaaacgcttgcagtggcgcttcctgtttatgcgtttttcgccgcggcgcttccggtttggcttttgctggctccgcgtgactatttaagcagttttatgaaaatcggggtttttgccgctttgatcgcaggcgtctttttcgtcaatcccgccattaaattcccggccgtaacggagtttattcacggcggagggccggtgatcgcgggtcctgtctggccgtttatttcaataacgattgcctgcggcgccatttcgggctttcatgcatttgtcggttccggcacaacgccgaaaatgctggataaatggagtgatataaagccggttgctttcggagcgatgcttgtggaatgtctcgtcggaattatggcgctcattgcagctgccgctcttgagcccgccgactattttgccattaacagcacgcctgaaatattccgcaccctcgggatgaatgtcgtccatctgcctgaattgagcaaagaaatcgggctcagtctggaaggaagaacgggcggcgctgttacgcttgccgtcggaatgacgtatatctttacggagattccgtttttcagtcatttggcttcatacttttttcaattcgtcattatgtttgaagcggtgtttattttaacggcgattgatgcgggaacccgtgtcgcccggtacttgattcaagagtttttcggagaggtctataagccgctgaaaaaaacagactggctgccgggctcgattttctcaagcgcgctcgcctgcctgctgtggggctatcttctgtattcgggcgacatcagttccatttgggcgctgttcggcgtatccaatcagcttatggcgtctgtcggcttaattatcggtgcgaccgtcgtattaaaaatagcggataagcggcgctatatgctgacatgcttgattcctctcgcttatttgtatgtgaccgtcaactatgcgggttattggatggtgcggtatgtgtatttgaaccctgaagcggcgggatacaacgtgctgaatggcgttttatccattatcatgctcattctcgggcttgtgattatcattgcggctgtgaaaaaatgggcgaatgtatggcgtgatccgagtgccagactggaagcttcaatacccggataaatccgcggccgtctaaacattgcagcatcataaaaaaagcagagagccgatcggtctctctgctttcatcttatgacaaatccgccgcttccaaaaggtaatccgccaaatgaaccgcgcggacacggcctgttaatccttcgcgtaaaatgccgagctgcatttgcagaaggcatccgggattggctgtcacgatgacggccgcctccgtttttccggcggctttcatcttgctgtctaatattttcatagacatctctgactctgttatattataaattcccgccgacccgcagcagctgtcggccttttccatttctctgtactcagcccctttaatgcttttcaaaagcgtgcgcggttcctctgacgtatgcatcacattgcggagatggcaggagtcctgatatgtgacgatatgaggagactgcacccgcaggtttttttgatggaacttcagatcaaccagtacggatgaaaagtctttgagcttccggacgaattgttcggcacgttccgcccatccaggttcatctttcagtaaatgcggatattcctgaagaaaggcgccgcatccgccggcgtttgtaatgatataatcagcgtcaagcgcttcaaaagccgcgatattccgcttggccagttcttttcccatctctttttctccgctgtgcccgtgaagcgcgccgcagcacgcctggccgtccggaaccgcgatttcacacccggccgcctgtaaaagcgccgttgtcgcatgatttgtcgctaaaaacatcgtatccattaagcagcccgagaaaaaagcggcccgtttttggacgggacccgcggcaggaagaaaacgcggccgttccttcatgtctttccgtttcgggacgggcgggagcacttgttccattgcgcgcagatgttcaggcaaaacgcgcagcataccggtttttctgacggcggtctgcagtcccgatctttggtatattccgagaagattcacggctgtctgcatgcgattttggtgtgggaaaagcccggtgaaggcggctttccgcaagaggcgcacgcccggcttatgttttttattttgatgaatgatatccctcgcttcttcaagcagctgtccgtaattgacccctgccggacaaacgggctcgcatgcccggcatccgagacacagcgaaagtgagcgctcgacatcttcatcaggctcgatcagtccgtcagtgacggctttcatcagggcgatccggccgcgcggcgaatgggattcttgaaatcccgattcgatataggtcggacaggaaggaaggcagaagccgcagcgcatacagttcagcaattcaccttcatccatgcggtttttgaattctgtttgaatttgtttctgctctttagccgtggtcatttcatcaccaccacgcgtttccttgatgaattggcgaatatttttcccggattcagcagattttggggatcaagcgcttgtttgatcgctttcatggcggtgatgccttctgttttcagtttcatttctaaatacggcgcttttacgatgccgaccccgtgttcacccgttatcgttccgcccagctcaatcgctttttcaaaaatggcggcaaaagctttttcgacacgttccatctcctctgtatttcggatatcggtggtgcacgtcggatggaggttgccgtctccggcatggccgaatgtgcagatggacaagccgtatgtttctgcaatctcgttaatggctttgaccatgctggcaatttgtgatctcggcacggtcgcatcttccagaatcgttgtcggtttcagccgggcgagggctgataatgcggaccgtctggcctctgtaagcgcgtatgcctcttcctcggtttcagccgtttggacggatacggctgctccgtttttacagatggcttcgattttttccatatctcgtctgaccgtgtcgatgtcaccgtcctgttcgatcagcaataccgcttttgcgtcggtcggaagcccgatcttggcgtaatcttcaatgacctgcagtgtcggctgatccagaaattcgagtgtcgccggaatgattttttcagcgataatggcagaaacagattccgcagccgcttcaatatgttcatagagtgcaagcagcgtttttttcgtttccggcttcggaaccagctttaaagtcgcttccgtcacaacgccgagcgtaccttctgatccgacgaaaagccgggtcagatcataaccggcgacatcctttgtcagctttcctcctgtgcggatgatatcgcctgaagccaagacggcttcaaggccgaggacataatcccgggtgacgccgtacttcaaaccgcgcagcccgccggaattttcattaatattcccgccgatcgtcgatattttcatgctgctcggatcaggcggataaaataaacctttttgttcaaccgcacggatcatatcttgcgtgatcacgcccggctggacggttgccgtcaaattttcttcatcgatttctagaatgcggttcatatgtttgaataaaagcacaagcccgccttcagacggacatgtgccgccgcataagtttgtgcctgaccccctcggcacgatcggaatgtcatgcctgctgcaaatcgttaatatacgggacacgtcatccgcgcagcggggggcgatgaccgcatccggcatggcttgcagctgaggagccgcatcataagaatacacaagacggcccgccgctgaatcatcataattctccttcccgaccgtccggatgaacgcttcttttgcctctcgtgaaatcatgttctcccaacctccctgataagaaaagcgttttcatttaattgtaaagaaaaacgattccgcacactatggagaaacatatgaaaaatgatgatatgattacgtgctttttgtatgttgatctaaaaagcgcagcgccaaataaaaagctgttatgtcttcagggcggtcgagattcatatttgtcagtgattccagtttggaaagacggtagcgcaatgtattgatatgaatatgcatgtcgtcggcggtgcgctttaacgataattgccggtcgaaaaaggcgcgcagcgtatccagaagttcttcccggtccagtacatgctcgagaacccgccgtgaaaactccgaccgcgtgccgggtgtgatatcggcaagacacatatccagttttaaatcttcttcaaagacggcctgcttgtcatcgattccggctgaaagtgctttatccgcctgttcgtatgattccgtgaggcgctctcccggaacgatccgtccgatgccggcggtgacaggctgcccaaaaacggcgccgatctttttaatgagctgtgttttggaagccgaatttgcttcatgattaatgagaatgcgttcatttccccagcggacaaacaggtcttcagggcattcgtactgccagagccgcccgagctcctccgctttatattgctcataacggccttgaatgagtatgatccggcggtatgcgtgaaggtctgcgccgatgagctttgctttttctaaaaagcccggagaccattctttcagctgcagccaatcaaccataaaggattcaagcattctcgcacgccactgcgcttcttccatatggcgcgtttctttaataaacagctccgtcatttttctgagcaattctccgaaaggcaggatatcgtcagggtctcctgtcaggccgaatactccgatcacttcatggcctgaaaaaacggggaggttcagtcctgcttttacgccctcgagccgtttttcatcttctttcgtaatgatgacattccgtttttcgcgcgcgcagatcagtgcgccttcatgaaaccatccggcgcgcgcctcgttggtgcccgcgatgatcattccttttgtatcggcaataatcacttcgcggctgtacatatgtttgacttcggcaatcaatttctttgccagttccggctgtaactgcatggcgatccccctcgccattattatacaaaaaaaaccgggtgtcccatcacccggttcatgtttattgcgcaggttttaatccgccttcaagtgttttgagcatttcatttttttctgagtccgacgcatgctgccaaagaacttcgaataagacgccgaggcccggaagcattttttcttcaccgctttggatggcgtcaacgatagtatgctccagctgatcctggttattgccggttacattggcaataacggcgttgcgtaaattaagatccattacaaccgctccttttttctgaatgtgatacgcatattcttaccgcgcacgcggtttattatgtgctgttcttaagatataataacaacatgcatgaaaaaaggagagcacagacataaagtgaaacgaatcgactctgcaaaaaaccaaaaagtgaaggactggaaaaaacttcacacaaaaaaagagagacttaaaacgaatacatttctgatagaaggagagcatctggcagaagaagcgctcaaatcaaagggaacggtaaaagaaattctcgtaaacgatgagagcgcgctcccggccgatctggacatgagcattccgtgctacgtgctgagcgaagacgcgttttcagccgtgacggaaacagaaacgccgcagcggatcgccgcggtctgccatatgccggataagcagcctgatcagctgaagcggctgcttctgattgatgccgtgcaggacccggggaatttaggaacaatgatcagaacggcagatgcggcggggatcgacgccgttgtccttggtgagggaacagcagacccgtacaatggaaaaacgctgcgttcagcacaaggatctcattttcatattcccattttaaaacgtccgcttgatgagttcaccgatgagctgaaatcacaaggcgtcgcgatctacggcacggcgcttgaaaacggtgcggcttatcaaagcgtgaagcctgaagaatcgttcgcgttaatcgtcgggaacgagggggcgggagtggacgccggccttctgcaaaaaaccgatctcaacttgtacgttccgctgtacgggcaggcggaatcgctgaatgtggcggtagcggccgccatcctcgtttatcatctcagaggataggttgcgaaaagccttggatttcactataatagatagcaataatgtaaaaaccgtgacagaggacgtcaatttttgcacacactgccttccagggagaaaatgccgctgactgagagcatttttatcgcagcacaaaaattgattttcacctctcgagttgtcaccgggaccgcgccgaacgcgcgtaaaggtgaaccggaacgatcgtttccgttatgtcaatgaagctgtcggcagatgaagtctgccttaaaaagggtggtaccgcggccacaactcgtcccttctctcaaggggcgggtttttttgttttctgaaaaaggcatagaacggtttggtttacataaaaggaggatgcatgatggaagagaagcttaaacagcttgaactggaagctgcagaaaaagtagaagcggcgggttcattaaaagaagttaacgacattcgggtgcaatatctcggaaaaaaagggccgattacagaagttctccgcggcatgggcaaactgtccgccgaagagcgcccgaaaatgggagcgctcgccaatgaagtgagagagcgcattgcagcagccattacggcaaaaaatgaacagcttgaacaagaagaaatgaataaaaaactcagcagccagacgattgacgtcacattgccgggcagtcaggtaaacatcggcgggcgccatccgctgacggtcgttattgaagaaattgaagatttatttatcggtatgggatataccgtcgaagaaggccctgaagtggaaacggattattacaactttgaggcgctgaacctgccgaaggaacatccggcccgcgacatgcaggacagcttttacattacagaagaaatgctgatgagaacgcaaacgtcaccggtgcagacgcgcacgatggaaaagcataaaggaaaaggccccgtcaaaatcatttgtcccggtaaagtgtatcgccgcgacaacgatgacgcgacacattcccatcagttcatgcagattgagggtctcgtcgtcgaccgcaaaatcagcatgagcgacctgaaaggcacgcttgaattggtcgccaaaaaaatgttcggccaagatcgtgaaatcaggctccgtccgagctttttcccattcacagagccttctgtagaggtggatgtgacctgctttaagtgcggcggacaaggctgctccgtctgcaaaaaaacaggctggatcgaaattctcggcgccggcatggttcacccgaacgtgctgaagatggccggattcaatcctgaggaataccagggttttgcttttggaatgggtgttgaacgtatcgcgatgctgaaatacggcattgaagatatccgccatttctataccaatgatgtcagattcatttcgcagtttaaacaggcgtaagaggaggatacacatgtttgtttcttataaatggttagaagattacgttgacttgcagggaatcgacccggccgtgcttgcagaaaaaattacaagagccggtattgaagttgagggtatcgagtataaaggggagggcgtaaaaggcgttgtcatcggacacgtgcttgagcgcgaacagcacccgaatgccgacaagctcaacaaatgccttgttgatatcggcgcggaggaacccgtgcagattatctgcggcgccccgaatgttgataaaggacagaaggttgccgttgcaacggtcggagccgtgcttcccggcaatttcaaaattaaaaaagccaagctgcgcggcgaagcgtctcacggcatgatctgttcccttcaggagctcggcattgaaagcaagctcgtggcgaaagaatatgcggaaggcattttcgtttttccgaatgatgctgaaacgggagctgacgcaatggcggcccttcagcttgatgatgcgattttagaattgggcttaacgccgaaccgcgccgacgcgatgaacatgcttggcgtggcttatgaagttgctgctatcctcggcgcagaggtaaagcttccggaggcttcatatgaaaaagcggcagaaaaagcggcggatgctgtttccgttaaggttgaagatacgcaggccaatccgcattatgccgcaaaaatcattaaaaacgtcaaaatcggcccgtctccgctttggatgcagacgaagctgatgaatgcaggcatccgcccgcataataacgtcgtggacattacaaacttcgtcctccttgagtacggacagccgcttcacgctttcgattacgaccggttcggttcaaaagaggtcgtcgtcagaaaagcggcggaaaacgaaaccatcgtgacgctggatgaacaagagcgcaagctgtcaagcagccatttggtcatcacaaacggaaaaaaagcgcaagccgttgcgggagtcatgggcggtgctgagtctgaagtccgcgaagacaccactgcgattttactggaagccgcttatttcgacggacagaccgtccgcaaagcgtcgagagacctcggactgagaagcgaagcgagcgccagatatgaaaaaggcattgatccggcccgcgttttgctggcagctgaacgggcctgcagtctcattcaggcatatgccggcggagaagtgctctcaggcacggttgaagaaaaccatctgaaaatcgaagcaaacaacattcacgtgtctgttgaaaaagtgaacgccgtactcggcatgacaatcgctaaagaagaaatcatcagcatttacaagcgcctcgggtttgcagtcggtgaagctgaagacgttctcgtcgtaacggtgccgtcgcgccgcggagatattagaatagaagaagacctgattgaagaagcggcgagattgtacgggtatgacaatattccgtccacgcttccggaaacggccggcacgacaggcggcttgacaccgtatcaggcaaaacgccggaaagtgagacgtttccttgaaggagcgggtctttcacaagcgaccacttattcattaacgaatgataaaaaagcggccgcttttgcgatcgaaaaatcattcaacacgatgcttgctctgccgatgagcgaagaaagaagcattctcagacacagccttgtgccgaatcttcttgaagccgtttcatacaatctggccagacagactgattccgttgctttatatgaaacgggttctgtatttctgacgaaagaagaaaacacaaaaccggttgaaaaagaacgggttgccggagctgtaaccggattgtggcgcaaaaatttatggcagggtgagaaaaagccggttgatttcttcgtcgccaaaggaatcgttgaaggcctgctgcatcaattgaatgtgtcagaccgggttgaatttgtccagtcagaacgcaaaaacatgcatcccggccggacggcaaacattctattgaacggttcgcttgccggatttatcggccaggtgcatccggcaatggaaaaagagctggatatcaaagaaacgtatgtgttcgagcttgatctgcacgcgcttctgaccgaggaaacagaacctgtcgtgtatacgccgattccgaagtacccgtccgtcacgcgcgacattgcgcttgtggcagataaaaccgttacaagcggacagctcgaagccgtgatcaaagaagccggcggcgcgctgctgaaagaagtcaccgtatttgatgtgtacgaaggtgagcatatggaagaaggcaaaaaatccgtcgccttctcgctccaatatgttaaccctgaacaaacattgacagaagaagaagtgacaaaagtacatgaaaacgtgctgaaagcgctggaagaaacgtatcaggctgtattaagaggataaagaaaaagcttgcagatcactctgcaagcttttttattatgaccgcttccgttcaacaaggcgttttgctttttgcgtattggcaaaatgaagtttggtgaacgttctgagcgcaccttctcccttattgatgatcagcttggcggcagcttcatcgacgtgcggccccgcgccttttggaatcgtcatcccagcctctcgggaaagcttatccatttcaattaagaaagaatatcgcgcaatgatagaggctgcggcgacggaaagatgtatgctttccgctttcgtgctgaaaaacgttttttcttttacgatatcccgtccggaaagatgcttaaaataaatgccgggctctgcgaattggtcaatcagaatcgcttccggtttaacgccgttcatttttctcagcagattggaaatcgcctgattatgaaggagcgccttcatttttccttggctcatgcctttttcctgcatctgattgtatttttcgttttttaacacaagcaggctgtaaggaatggttttaattaacagtttggcgatttcaataatctgcggatcttttaaatccttcgaatccttcacaccgagttctttcattaaagagagctttgatttgtcggcgtaggcgcaggcaactgttatcggcccgaagtaatcgcctgttccgacttcatcagagccgatcactgacatggaggcaatgcccgccgggggagcgtagagcgggtcggccgcttttttgacggttttctttgctttcggcgcctcagccgttccccagcgggccgcttctgtgccggcgttttttccttgaaagagaaccttgcccgagcggtaggctgtaatggtacagcccggaggcttggcctggaagacggcgccctgcggaaccgcgggagtaagggagccggcataggattgtttcatttgttccatagcggaagcggatacttttataacagaatgggacacgatataatctccttttttggcacttttcactgtatataccagtgtatcataacagcctgaggctcgtctttccattcaaacgataatcgtggtatgataggaactaggattctcgcggaatggaggagaaacgttgtctgacggcaaaaaaaccaaaacgacagtaaacatttacggccagcacttcaccattatcggggaagaaagcaaagcgcacatgcgccatgtggccggagtggttgatgataaaatgagagaaatcaacgagaaaaatccatatcttgatataaataagctcgctgtattgactgcggtcaatgtcgtgcatgattatatgaaactgcaagaaaaatatgaaatactggagcggcagcttaaagaaaaggaatgaacaccatatgatagatatcatcatcttagttctgctcttaatgggcacattgcttggattaaaaagaggatttatcctccaatttatatatttaacgagtttcatcctctcgattgcgtttgcggcgcttttttacaaaaacctggccccgcatctgagctttatacccgcgcctgatttttccggcgggcaggcggctctgtcttttattaaaggaaacgtagagacggcttattacaacgcgatcgcgtttgtcattttgtttatcatcgcaaagattctgcttcggattatcggagcggcgcttaatattatcgccagcattccggtcattaaacagatcaacaaactgctgggcggggtgctcggatttctggaagtctatttatttgcgtttatcctgttatacgtcgcatccgtactgccggtaagcgcgcttcaggatatgctcgcacaatcgacgcttgcaaatatcatcacacatcatacgccgtatctgtcagggctcctgcaagaactgtgggcccagtacggggcataaaaaacttctcttgacggagaagtttttttcaagctctgcgtcagttgtgccggaggagaaaaatttgtatgatgaaaagcaggaaacgactggggggtaacagtatgcataaaaaagatatcatcaggctgcttgaaacgattgcggtctatatggaactgaaaggggacaacccgtttaaaatatcagccttccgaaaagcggcagcggcgcttgagcaggatgaccgcagcctgtcggaaatcgacgacatgatgtctatatccggcatcggaaaaggcacttacggcgtcattcgtgaatatatgcaggaaggtgtgtccggcacgcttctccaattgcagaaagaagttccggaaggcttggttcctcttttgaagcttccgggcctcggcggcaaaaaaatcgccaagctgtatcaggaactgggcgttcatgacgcggaatcgctgaaagaagcgtgcgagcagcaaaaagtacaggggctcgccggtttcggcaaaaaaacggaggagaaaatccttcaggctctcggagaagccggaaaacagccggaacgttttccgatcggctatgcgctcggcattgcttcagtaattgaagaacatttagcccggcttacggatattcagaaatattcccgggccggcagtctcagaagagcgcgggaaaccgtaaaagatctggattacattatcgctacagatcatccggaggctgtcagagaacagcttctttccctcccgaacgtaaaagacgtgatagcgagcggggatacaaaagtatcagtcatcctgacctttgaatatgagacgagtgtggatttccggcttgtgacagaggaacagtttgccaccacgctgcatcattttaccggttctaaagatcacaacattaaaatgcgccagctggcgaaagagcgcggtgaacggatcagtgaatacggagtagaaaccatagaaacgggagacgtcaaaacattcccgagcgaagaagcgttttacgcccacttcggtctgccgtttattcctcctgagctcagagaaaccgggcaggaggtcgacacgtaccgggaagaaacggatcttgtggagcataaagcgataaaaggcgatctccacatgcactcagcctggagtgacggcgctttttccatcagagaaatggcagaagcgtgtatggcaaaaggctatcagtacatggcgatcaccgaccattcccaatatttaaaggtagccaacgggttaacggccgaacggctcaaaaaacaggcggaagaaattgacgcgttaaatgctgaatttgaaaattttcatatttttaaaggcgtagaaatggacattctccccgacggttcgctcgattatgatgacagtgttctgtctgaagtggatcttgtcatcgcgtctattcattcaagcttcagccagccggaacatgtcattatgaaacggcttgaacaggcgctgacgaataagcacgtggacattatcgcccacccgacgggacgcctgatcggcagacgggccggctatgaagtcgacatcgacatgctgattgaactcgcagctaaaacaaatacggcgcttgaactgaatgcaaaccccgcgcgtctcgatttgcggactgagcatctgatcaaagcaaatgaaaaaggcgtgactttggtcattaatacagatgcccataatatcgagatgctcgatgatatgaaaacgggcgtgaccgctgcgcgcaaaggctggacggaaacaaaacatgtgttaaacgcccggccgctacacgaggtcaaagcatttctgacgcgcaatgattaagtaaggaggatcacaaaaccgtgcagcaaaaagtgttatcatcacttgaatttcataaagtaaaagaacagattaccgcacatgccgcctcatcgctcggccgggagaagcttctgcagctgaaacctttgacggatctctcagacatccaaaaacagctggatgaagtcgaagaagcatccgcggtcatgcgcttgagaggccatgctccgttcggcggcctgaccgacataagatccgctttacggcgggcggaaatcggcagtgtgctgacgccggcggaattcaccgaattgtccgggctgctgtatgccgttaaacaaatgaagcattttatcagccaaatgacagaagacggcgtcggcattccgctgatacaagcccatgcagaagagctgattacattaggcgatttggaaagggagattaactcctgcattgatgaccatggtgaagtgcttgatcatgcgtctcccgctttaaggggaatccgcacgcagctcaggacgcttgaatcaagagtcagagatcggcttgaatcgatgctgcgttcatcttccgcttctaaaatgctgtctgacaccatcgttacgattcggaatgaccgctttgtcatcccggtcaaacaggaatacagatcaagctacggcggaattgtccacgatacatcttcatccggtgcgacactgtttattgaaccgcaggcgatcgtagatatgaacaactcgcttcagcaggcgaaagtaaaagaaaaacaggaaatcgaacgaattctccgaatgctgacggagcatacggctgaacacacacaagaaatcgctcaaaatgtggaagtgctgcagacactggatttcattttcgccaaagcgagatacgcaaaagcaatgaaggcgacaaaaccactcatgaacggagacggttttatccggctgaaaaaagcgcgtcatccgctgctgccccaagatcaagtcgtggccaacgatattgaactgggcggagattactcaacgatcgttatcacgggaccgaatacgggcggtaaaaccgttacgttaaaaacactcgggctgctgacgataatggcgcaggcgggattgcacataccggctgatgaaggatcggaagcagccgtatttgacaatgtgtttgccgatatcggcgatgaacagtcgatcgaacaaagtctgagtacgttctcatcccacatggtcaatatcgtcaatattttaaaagacgtgtctgaaaacagtcttgtgctgtttgatgaactcggtgccggaacagatccgcaggaaggagccgcgcttgcgatgagcatccttgacgaagttcaccggacaaacgccagagtgcttgcgacaacccattatccggaactgaaagcatacggatataacagacaaggcgtcatgaatgccagcgttgaatttgacattgaaacgctctcgcctacctataagcttctgatcggagtgccgggccgaagcaacgcatttgaaatctcaagacgccttgggcttccggagcatatcatcggccaggcgaagtcagaaatgaccgccgaacataacgaagtcgatctgatgatcgcatcgcttgaaaaaagcaaaaaaagagcggatgaagaactttctaaaaccgaatcaatcagaaaagaagcagaaaaactgcacaaagagcttcagcagcaaatcattgagctgaacgcccaaaaagataaaatgatggaagaagccgaacagaaagctgcggaaaaactggaagccgccgcaaaagaagccgaacagatcatccgcgaactccggtccatcaagcaagaacacagatcctttaaggaacacgagctgattgacgccaaaaaacgtctcggagacgcgatgccggcttttgaaaaatcaaagcagccggaaagaaaaacagagaaaaaacgcgagctcaagccgggcgacgaagtaaaggtgctcacattcggacaaaaaggggcgctgcttgagaaaaccggcgagaaagaatggaacgtccaaatcggcatcctcaaaatgaaggtgaaggaaaaagatcttgagttcctcaaatcggctcctgaaccgaaaaaagaaaaagcaatcaccgccgtaaaagggaaggattatcacgtatcccttgaacttgacctcaggggagagcgttacgaaaacgccctcagccgcgtcgaaaaatatttagatgacgcggtgcttgccggctatccgagagtgtccatcattcacggaaaaggcacgggcgccctccgaaaaggggtgcaggatcttctgaaaaaccaccgcagcgtgaaaagctcgcggttcggggaagcgggagaaggaggatcaggcgtaacgattgtcgaactaaaataaaaagggagtaaacgtcatgaatgctttttgggaaaatgagcttgttgaaatcgcggcttattacagtgtagccgtcttgtgtctcgtcatttttctgaccgtgtttgaattggtgacatcctataaaaactgggtggaaatccaaaaaggcaatcttgcggtggcaatggcgaccggagggaaaattctcggtatcgcaaatgtctttcagcacagcatcgcccagcataattcgcttttgcaaatgatcggctggggcgtatacggatttattatgcttttaatcagctattttatctttgaatttctgacgccccggtttaaaattgataaagaaattgaaaaagataacagagctgtcggctttatttcatttgtcatctcagtcggcctgtcatttgtggtggccgccgggatttaaggggacggggaaaaatggagaagcttgcgaaagtgctgctgtcggcagcgggaatttttctgttcatcggacttatttatctggtcatgacatcttaatactgaaaaaaggctgccgaactagaatcggcggccttttttattgagaataccagtttatgcaggccgtatcagagcaaatgacggcttcccaactcatggcgcggatgacagacggcatgtcttgatcttccatgagaaagagtgtcataaaagaatcatatatgctcataaaagcggcgcgccgtttttcgtcggcaatgatcatgtcagcccgcagcaatccgcatacatccgaagccgccgtttgattgagtgaaaatatgcctttctcttcgacaggctcataataagtgcagcgctttatgccttttgaacggaacacatccaaaagtcccggaattaaaaatggtgaagtgacatcctcgctcggcaagtacagatcgggatgatgaagccgatttaacagctcggcggattcaggatgtgcatattcatcccgaagtgccatgacagcgctcataagcgcaagcgccgtctctttttcagagcgcaatccgcaaacggtcatgacggtttgccaggaaacgggtctgcccatcgcgatgatctcctcatcactcggatacatatgttcataaggccgtttgcgcttttgctcttcccacccatcaggcatccggacaaagggatgaagcaaaaaggcggccgacgtaaacggcttcggcagctggcgcaggataggaactccctcttcaaaatgcagcgtttccagcaaactcaacacctcctgaaactcgaaatttcacatgaaacgctttcccattccaatcacccttctgctataataatagcgtataggaaaacagaagggagaggtattatgcagtctgaaaagccatggctttctcaatatcccgaagagattccgcatgagcttgaatttaccgatcaaaccctgccatccaatctgacaaactccgcagctcaattcccgaaccacaccgccatttattttctcgggaaaaaactcacattccaagacgttctcacagattcgttaaagctggccgcttttttacgcaaaacaggtctgaaaaaaggtgacagagccgccattatgctgcccaattgtccgcagtcggtcatcgctttttacggcgtattgtttgccggcggcattgtcgttcagaccaatcctctctacacggaacacgagcttgagtatcagctgaaagacagtgcgccgcgcgtgatcatcaccctcgatatgctgtttccgaaagtgataaaaatgaaaacgttatcactcgtcgaaggcattattacaacgagtataaaagactttttgccgtttccgaaaaatatgctgtatacgctcacgcaaaaacagcaggttcatattgattatgacggctgcgaacaaattcacaaattagcggatattttaaaaaacgaaagagcggaggaagcagagccatttgatattgaccctgcgcatgacatcgccgtgcttcaatacacgggcggaacaaccggctatccgaaaggtgtcatgctcacacatcggaacattcaggccaatacagaaatgtgcgccgcctggatgtacaaaatgaaaaagggagccgaaaaggtgctcggcatcgtgcctttttttcatgtgtacggattgaccgctgtgcttaatttttccattatgcagggatgtgaaatgatccttcttcccaaattcaatcctttggataccttgaaaacaatcgacaggctgaagccgacggtttttcccggggcgccgacgatttacatcgggctgttgcatcatccggagctgaataaatatgatctgtcctccattgaaaactgtccgagcggttcagcggcgctgccggttgaggtcaaacagaaatttgaaaaagtgaccggaggaaagcttgtggaaggctacggattatccgaagcatcaccggttacccattcaaacttcatctggggaaaaaacaaacccggcagcatcggctgtccctggcccaataccgacgccggaatctattcagaagaaaaaggcgggcttgcggagccgtatgaacacggcgagctgatcgtaaaaggccctcagatcatgaaagggtactggaataagcaggaggagacggcgcgtgtcatcagagacggctggctgtttaccggagatatgggatatatggatgaggaaggatttttctacatcgccgacaggaaaaaagacatcatcattgccggcgggtacaacatttacccccgagaggtggaagaggcgctttatgagcatgaagccgttcaggaaatcgtcgtagcgggcgttcctgattcctacaggggggaaacggtgaaagcatttatcgttttgaaaaaagacgccgaggcagatgccgatgagcttgatgcgtttgcaagagagcggcttgcgccgtacaaagtcccgaagctttacgaattcagaaaagagcttccgaaaacggccgtcggaaaaatattaagaaggcgtttagtcgaagaggaagatgcttcccgtgaaaacaaggtgccttaaaagaaaaacttgacaaaatccggattcctttttatcatgaagttatgaatgaatagtcattcatttatcgaaggaaggaacgatgacattgaaccaaaaacggccaaagtatatgcagattattgatgcagcagtagaagtcatagcggaaaacggctatcaccaatcacaggtgtccaaaatcgccaagcaggccggcgttgcggacggcaccatctatttatatttcaaaaacaaagaggatatactcatttctctttttaaagaaaagatgggccagttcattgaacgcatggaagaagaagtgaaagaaaaaacgtcggcaaaagaaaaactcgctctcgttattaagcagcatttcacactgctcggcaatgaccgccacctcgcgattgtgacccagcttgagctcagacagtcgaatatcaagctgcgcctgaaaatcaatgatattttaaaaggttatttaaacatgctggacaccattttgaccgaaggaatcaagtcgggggaatggaaagacaatctcgacgtccgcctcgcccggcagatgatattcgggacgatagatgaaacagtgacaacatgggtgatgaacgatcagaaatatgatcttccggatttgtcagacaaggtattggagctgttggtgtcaggaattcatcaaaactaaagggggttgacggatgaacagcctttcgatggcggtagaacaatctgttgcggtgatcaccattaatcatcagccggccaacgcgctgtcaggtgcggttttagatgagttgtccggtatgttcgaccggtgtgaaacggatgacagcgtcagaagcatcatcattcgcggtgagggaaaatttttctcggcgggcgccgatataaaggaatttacgtcgcttgaaaatcttgagcaatcttctgccatggcggataaaggccagcagctgatggaaagaattgaagggtttccgaagcccgttatcgcagcgattcacggcgctgcgctcggcggcggtcttgagctagccatggcctgccatatcagaatcgctacattggatgcaaagctcggcctgcccgagctgaatctcggcattattccgggctttgccgggacgcagcggcttccccggtacgtcggtacggcgaaagcgcttgaaatgatcggcacttcagaacctgtgaccggagaagaagcgctcagcctcggccttatcacgataggcgccgaacatgaggaagagctgctgcaaaaagcgaaaacgctcgcgggcaagtttgcggaaaaaagcccgcagtcgatggcttatctgcttgagctcctttattcaaacaagatctattcttatgacggcggcttaaagcttgaagcaaagcgctttggggaagcatttgcatcagatgacgcaaaagaaggcattcaggcatttctcgaaaaaagaaagcctcaattcggtgggcgaagataaaggggataagattatgaatctatttgtactgatgaaacggacgtttgacacagaagagaaaatcgtcattgaagcaggaaagattcaggaggacggggccgaatttatcattaatccgtatgatgaatacgccattgaagaagccattcagctgaaggaagagcacggcggaaccgttaccgccgtaaccgtcggcggagaagatgcggagaaagaactgagaaccgcccttgcgatgggctgtgaccaggcggtgttaatcaatattgaagatgatctgagcgatcctgaccaatactccatttcaactatcttatatcattatttcaaggaccgggaatatgatctgattctcggcggaaatgtcgcgattgacggcggttcaggccaagtggctccaaggcttgccgaactgctgaacattccttgcgtcacaacgatcacaaaactgacaatcagcggcgatgaagctgtggcagagaaagacaatgaaggggataccgaaatcattaaaacctcacttcctttagtcatcacggcacagcaaggcttaaacgagccgcgctatccgtcgcttccgggcattatgaaggcgaagaaaaaaccgctggaagaacttgagctcgatgatctcgacattgatgaagatgaagccgcaccgaagctcaaaacgatcgaacgttttctgccgccgcaaaaagaagcgggcagactgatcgaaggagaagccgctgagcaggcgaaagagcttgtgtcactgctgagaaaagaagccaaagtcgtataaaccgatattaaagaaactgggggatgtcagaatgggaaaaaaagtgatcgtactcggagaaattcgtgacggcgccttacggaacgtcacctttgaagccatagcagcaggcaaaaccatttccggcggaggagatgtcatcggcgtgctgatgggaaaaggcgcggctgatgcagcaccggaactcattcagtacggcgccgacaaagtatttacggccgatgcgccggggcttactcagtatacagcggacggatatgccgcggttctcggggatctgatcgaaaatgaaaagcctgatgcggtcattttcggccacacttctatgggaaaagatttgtcacctaagcttgcggcccggtttgaaacggggctgatctcagacagcacggatgtaagcgttaccggagacaacatcgcttttaccagaccgatctattcgggcaaagcctttgaacaggtgatttcaaccgatccgttcattttggcgacaattcggccgaataatattcaggcattagaaaaagacgcgaaccggacgggtgatattgaagagcttgcggcacctccggcagatttgcggacggtcattgaagaagtagtcaaaaaaacggcggacggcgtggatttatcagaagcgaaaattatcgtagcaggcggccgcggtgtaaaaagcaaagatggatttgaaccgttaaaagaacttgccgaggtgctcggagcagcggtgggcgcttcacgcggcgcgtgtgacgcggactattgcgattattcccttcaaatcggtcagacgggaaaagtcgtcacgccggatttgtatatcgcatgcggaatttccggagcgattcagcacttggcgggcatgtcaaacagtaaggtcatcgttgccattaacaaagacccggaagcggaaatatttaaaatagcggactacggaattgtcggcgatttgttcgaagtggttccgcttctgacccaggaatttaaaaatgccaatattcattcataatcaaaaccctctggcttatttgtcagagggttttgatttgtgttaattagttcggacaaattatagattaataaaacaacggattgacatgtacgaaccaatgtaataagcttttgtaaagcgcttacaaacttatccatacagcattcatcccagatagattgtctctagtgctttcattcttattaaggggaaggaatgatcaagtttgtctcacaatacggcagtcattcaaactgatatcacacggggaaccattaataaaaacatatacggacatttcgcggaacatctgggaagaggcatatatgagggcatctgggtcggaaaagattccgatattccgaataccggcgggatcaggacggatgtcgccgacgccctcaaacagcttcagattcccgtcctcagatggccgggcggctgttttgcagatgaataccattgggcaaacggcgtagggaaacgcaaaaccatgctgaatacccattggggcgggacgattgattccaatgaattcggcacgcacgagtttatgatgctttgtgaactgctcggctgcgaaccgtacatcgccggaaacgtcggcagcggaacggttaaagaaatggctgattggattgaatacatgacgtttgaagagggcacgccgatgtccgactggagaaaagaaaacgggcgggaaaaaccgtggaagctgaaatatttcggaataggaaatgagaactggggctgcggcggaaacatgcatcctgagtattatgccgacctttacagaaactttcaaacctatgtccgcaattacagcggtaatgaaatctataaaattgccggcggcgcgaatgtcgacgattaccgctggactgaaactttaatgaaaaaagccgctgatctcatggacgggctgagccttcattattacacaataccgggcgacttctggaaggggaaaggatcagcgacggagttttcggaagatgaatggttcatcacgatgaaaaaagcggcgcatatggatgaattgatcacaaggcacagtgccatcatggatcagtacgatcccgaaaaaagagtcgggctgatcattgatgaatggggcacgtggcttgatcctgagccgggcacgaatccgggctttctgtatcagcagaatacgatccgcgacgcccttgtcgcagccacgcattttcatatttttcatcagcacgcagaccgcgtacagatggccaatatcgcgcaaaccgtcaatgtgcttcaggcaatgatcctgacagaagggaaagaaatgctgttgacgccgacgtatcatgtgtttgatatgtttaaggtgcatcaggacgcatctcttttggcgacagaaacaaaagcagccgggtacgaaaggaatgacggccggctcccgcaagtcagcatttcagcgtccaaacagcaaaacggagacatacatatcagcatttgcaatatcgatcatctgcacaaagctgatgtgaagattgaactgcggggcatgaaaaagacagggaagccttcgggaacgattctgcacgcggaaaaaatgaatgcccataatacattcagcagtccggaaaacgtcaaaccgaagccgttttccgggtttgctcaaaagggcggaaaacttgaggcggagcttcctccgatggcggttgtattaatcacgctgcctgcggacccatcttaagttttgaacgcctgccgcccggttataatacactgtataaaaaagattatttccggcgggttcgggagaaaataatataagcattaaattagcatgaacgaatgggagatgctatactaaaaatcatcatttgacaattggaggaataacaaaatggctatcgtaaaagcaactgatcaatcgttctcagctgaaacaagtgaaggtgtcgtattggctgatttctgggctccttggtgcggaccttgtaaaatgatcgcgcccgttcttgaagagcttgatcaagaaatgggagacaaactgaaaatcgtcaaaatcgacgtggatgaaaaccaagaaactgccggtaaatacggcgtcatgagcatcccgacacttctcgtattgaaagacggagaagtcgttgaaacatctgtcggtttcaaaccgaaagaagctcttgaagagcttgtaaacaaacatctgtaagccgaaagcttccgttacggcagggcgattcctttgaaagggaatcgccttttttgatcttccaaaagctgagaatggagaaaaacaaatgttcgtgatacactgaatggacacgagaaatgaatgtaaggaagggtaacgtatgaataaacaactgaaagaaaaactggccctccttcccgatcagccgggctgttatttaatgaaagaccgtcaaaaaacagtcatctacgtggggaaagcgaaagtcttgaaaaacagggtgcgctcttatttcaccggttctcatgacgcaaaaacccaacggcttgtgacggagattgaggactttgaatatatcgtgacttcctccaatcttgaagcgcttattttggaaatgaatctgattaaaaaatacgatccgaaatacaatgtcatgctgaaagatgataaaacctatccctttattaaaatcacccatgaacgccatccgcggctgattgtcacccggaatgtcaaaaaagacaaaggacgctatttcggcccgtatccgaatgtgcaggcggcgcgggaaacgaaaaaactgctggaccgcctttacccgcttaggaaatgctcaaagcttccggaccgcgtctgtctttattatcatctcggacaatgcctcgccccatgtgtaaaggatatatctgaggagacaaaccgcgagattgttgaagacatcacccgttttttaaagggagggcataacgaaatcaaaaaagagctcgaagcgaaaatggcagaagcggcggaaaagcttgaatttgaacgggctaaagaattccgcgaccagcttgctcacatcgaatcgacgatggagaagcagaaaatgaccatgaatgaccttctggaccgcgatgtgtttgcatatgcctacgataaaggctggatgtgcgtccaagtctttttcattcgccaaggaaaactgatcgaacgcgacgtcagcatgtttccgatgtatcaggaagcggatgaagaatttctgaccttcatcggccagttctactctaaaaacaatcactttctgcctaaggaaattctggtgcctgacagcgttgacagggacatgatcaccgagctgctggaaaccgccgtgcatcagccgaaaaaaggcccgaaaaaagagctgcttttgcttgcgcacaaaaatgcgaaaatcgctctgcgggaaaaattctcgttaatcgagcgggatgaggaacggtcaatcggtgcagccgaacggctcggcgaagcgctgaatatttacacgccgcatcggattgaagcgtttgacaactccaatattcaaggcacaaaccccgtatcggccatgattgtctttattgacggaaaaccgaataaaaaggaataccgcaaatataaaattaaaaccgtaacagggccggatgattacggttcaatgagggaagtcgtcagaagaaggtacacgagggtgctccgcgaaaaccttcccctgccggatttaatcatcattgacggcggaaaagggcagattaacgcggcgcgcgacgtgctcgagaatgagctcggccttgatgtcccggtagcgggattggcgaaagatgataaacaccgaacatccaaccttttgatcggcgacccgcttgaaccggtgtttttggagcggaacagccaagagttttacctgcttcagcgtattcaggacgaagttcaccgttttgcgatcagctttcacagacagatccgaggaaaaagcgtctttcaatccgttctggatgatatccccggaatcggcgaaaaacgcaaaaaaatgctcttaaaacatttcggatctgtcaaaaagatgaaggaagcaagccttgacgatatcaaaaaagcgggtgtgccggccgcggcggcccagctgctgtttgaaaaattaaaaaaatagtattgtgcttttcagaaaaatctgctagaatgtgaactaatttcataagatcgtgttatatggtgaagatagaggtgcgaacttcaatagtaagcctttggagaatgatggattctgcgaaaaaggctgaaaggggagcgtcgccgaagtgtatcacatcccatcggtgtgatttgctggccttgcattaaataaatgtaaggctgtcaagaattcattttcttggagggctatctcgttgttcataatcaatcgtaatgatatgaaaaagcaatgagagctattcctctcattgctttttttattgtggacaaaacgctcttttctcctcacccgcacgaaccaaaatgtaaagggtggtctagtatgggtcttatcgtacaaaaattcggaggcacttccgtcggctctgccgaaaaaattcaaaatgctgcaaatcgcgccattgctgaaaagcaaaaaggccatgatgtcgtagtcgtcgtttcggcaatgggaaaatcaaccgacgcgctcgttaacctcgcggctgaaatcacatctgaaccaagcagacgcgagatggatatgcttttgtctacgggagagcaggtcacgatttcgcttttggccatggcgcttcaggaaaaaggatatgacgccgtctcttatacgggctggcaggcgggtgtccgcacggaagccgttcacggcaatgcgagaattacggatattgatattacggcgattcgttcgcagcttgcagaaggcaaaattacagtcgttgccggttttcagggcgtaacggaagacggcggcatcacgacgctcggacggggcggttccgatacgacggcggtcgctcttgcagcagcgttggaagcggataaatgcgacatttatacagatgttccgggcgtatttacgacagatccgcggtatgtccggtcagcgagaaaactggcgggaatttcttatgatgaaatgctggagcttgcaaatctaggagcgggtgttcttcacccgcgggcggttgagttcgcgaaaaactaccaagtgcctttagaagtgcggtcaagcacagaacatgaagctggaacattaattgaggaggaatcatcaatggagcagaatttaatcgtcagaggaattgcatttgaagaccagatcacgagggtgtccgttacaggccttgcaagcggattgacaacactttcaacaatcttcaccgcgctggcaaaacgaaacatcaacgttgacattattattcagacacagtcggacgatggggaagcggatatttctttctcagtgaaaacggaagatgccgcgcaaacggtcgccgtgcttgaagaatataaaaacgcgcttgactatgaaaaaattgaaaccgaaagaaaactggcgaaagtctctattgtcgggtcgggcatggtttcaaatcccggcgtcgccgcggacatgtttgccgtactggcggaaaaaaatgtacaagtcaaaatggtgagcacatctgaaataaaagtatcagcggttgtcagcgaaaatgatatggtgaaagcggtcgaagcgcttcatgatgcgtttgagctttctaaacagccgtctgccgtataaacgggcaggcaaaaaggcgggacttggagtcaccgccttttttcaattatacagggtccttcatatcccattttacggtcaggacgactttatccgctctcttttttacctgttcataagattctgcaatctgatcgttcatcaattgaatctgttcggctataaaaccggcttcaagctgaaaacaaggctctttctgatgtttgagcctgctggatacgagcggtccttccagttcgaattccagttcttgtttttttgatcctgcgtttgtcaaagttccccagccggctttttcaaaaaaggcggggatttcttcccacgattgaagaggaaatttgcgggcgaggcgttttcccgcccaatacatcatggatgaatgctccgggccgaggatatccggaagcacgatttcccggattaattcgtagccgtatgcgctgacgtcgagttcagttaaaggttctaaagctgcttcataattattcttcatattatgtattcccctctctccttcgtttattatagcttaaacatgggggagggttacaggatgatcctataaaacacgcgaaaaaatgtgagaaagatatcgcaggaaaataaaattttccctccagataatcaattccgaaaattataatttatgtacacgttttcttgacgcccttttgagggaggagtaaaatgaaattgtcaataaattttaataaagtgcttacaattgaaacgaagtgggggcagagattttagtacatttcgcacttaaatcaaacagggggtaaagtaatgtctgggaacagagagttttattttcgaagattgcattccttgctcggtgttattccggtcggcatctttttgatccagcatttagtcgtcaaccaatttgccgcaaggggagcggatgcgtttaacaaggcggccggctttatggacagtctgccgttcaggtatgcgttagaaatttttattattttcttacctttaatttatcatgcggtttacggtgtgtacatagcatttactgcgaaaaacaacgctggccactacagttatttcagaaactggatgtttgtgcttcagcgtgtcactggtattctcacccttattttcgtcagctggcatgtatggcagacgcggattgccgcgcagatgggcgctgaagtcaacttcgatatgatggcgaatattctgagcttgccgtttatgctcggtttttacattgtaggcgttttatcggtcattttccacttttcgaacggcttatggtcttttgcggtcacatgggggatcacggtcacgccgcgttctcaaagaatttcgacttacgtgacgctgattatatttttagcgctttcatacgtaggtttaaaagcgatttttgcgtttgtgtaagagaactagattactagagggagaggggctatcatgagtcaatcaagcattatcgtagtcggcgggggtcttgccggcctcatggcgacaattaaagcagcggaatcaggcacggccgttaaattgttttccatcgttccggtcaaacgctctcactcggtctgcgcgcagggcgggataaacggagctgtcaacacaaaaggggaaggagactctccgtttgagcattttgatgacacggtatacggaggcgactttttggcaaaccagcctcctgtaaaagcgatgtgtgaagcggcgccgtccattatccacttattggaccgcatgggggttatgtttaacagaacgccggaagggctcttggacttccgccgtttcgggggtacacagcatcacagaaccgcatacgcgggagcgacgacgggtcagcagctgctttacgcactggacgagcaggtgcgcagatatgaagtggcgggtctcgtcacaaaatacgaaggctgggaattcctcggcgccgttcttgacgatgagcgcacgtgccgcggtatcgtagcccaaaatctgaccaatatgcaaatcgagtcattccgttctgacgccgttattatggcgacgggaggacccggaatcgtattcggaaaatcaacaaacagcatgatcaacacgggatctgccgcatcaatcgtctatcagcagggcgcttattatgcaaacggcgaatttatccaaattcacccgacagcaatcccgggggacgataaactgcgtctgatgagtgaatcggcgcgcggcgagggcggaagagtctggacgtacaaagacggaaaaccttggtacttccttgaggaaaaatatccggcttacggaaacctcgtgccacgggatattgcgacacgtgaaatctttgacgtgtgcgtgaatcagaaactcggcatcaacggtgaaaacatggtgtatctcgatctgtcgcacaaagatccgaaagagcttgacgttaagcttggcggcattattgaaatctatgaaaaattcatgggtgatgacccgcgcaagcttccgatgaaaattttccctgccgttcactattcaatgggcggactgtgggttgattatgatcagatgacaagcatccgcggactgttcgcagcgggtgaatgtgattattcaatgcacggaggaaaccgtttaggggcgaactctctgctttccgccatctacggaggaatggtggccggaccgaatgcggtgaaatatgtttccggacttgaaacatcagcggaagacctgtcttcttcattatttgattcctatgtgaaaaaagaagaagaaaaatgggccgatatcatgaagatggacggcgacgaaaatgcttacgtgcttcaccgtgagctcggagaatggatgacggccaacgtcacggtggtccgccacaacgacaagcttttgaaaacggatgacaaaatccaagagctgatggaacgctttaagaaaatcaatatcaacgatacgacaaaatggagcaaccaaggggcgatgttcacccgccagttctccaatatgcttcagcttgccagagtcatcacgctcggcgcatataaccgaaatgaaagccggggagcgcactataaaccggatttccctgaaagaaatgacgatgagtggctcaaaacgacgatggctaaacatgccggtccgtttgaagctccggaatttgaatatcaggatgtcgatgtatcactgattgcgccccgtaaacgcgactactcgaagaagaaggtggcgaaataatcatgagtgagaaaaagatacggtttatcattacacgtcaggatacgcccgaaagcgcgccatacgatgaagaattcgaaatcaattaccgcccgaatctgaacgtgatttccgccctgatggaaatccgaagaaaccccgtgaatgcaaaaggagagaaaaccactccggtcgcatgggacatgaactgtcttgaagaagtatgcggcgcctgctccatggtcatcaatgggagacctcgccagtcatgcacggcgctgattgataagctggaacagccgatccgtctgaagccgatgaaaacattcccggttgtccgtgaccttcaggttgaccgcagcagaatgtttgattcactgaaaaaagtgaaagcatgggtgccgattgacggaacttacgatttggggccggggccgagaatgccggaaaaacgccgccagtgggcatatgaattgtctaaatgcatgacatgcggcgtctgcctcgaagcctgcccgaacgtcaacagcaagtcgaaattcatggggcctgccccgatgtcgcaagtgcgtctgtttaacgctcatccgacgggcgcgatgaacaaagcagaacgtttagaagcgttaatgacagacggcggcctcggagattgcgggaattcacaaaactgtgttcaatcctgcccgaaaggcattccgcttacgacttcgatcgctgctttgaacagagataccaatttacaagcattccgtaatttcttcggaagcgacagagtataagaaagagaaaaagagcctcttccgcacgggagaggtttttttataaggagctgaaggtgatgaaacaaccgcaatatattgatatcccgtttgaagaatggagacagtcgttttctttctttactgaagtatcggttcgtttttcagaaacggatatgttcggccatatgaataatgtaacccctttcatctattttgaagaagcacggatcgcttattttaaacagcgaggcatgacggcgcaaaactcggaaacgatgacggtcgtcgcaagccagcagtgtgactatatgcgtcaggtgatgccgtatgaaaatctgcggatttatgtgaaagcaagcgctgccggaaatgcgtccgtcacccttcattaccttggagaaaatgagtcgggcctcccgtgctttacaggttccgtcgttatggttcaagtgtcgaagaaaagcggcaaagcggtcagctggacggagcgggagaaaggcattctgctcgcctgaacggataactatttctctaagagacgtcacctccgaagcgccctttacatatgatatcttgactatataaacccattcgtttcagattcgctctcaccttagcaaggagggttacaatacttgaaggagaaagattttcaatcaaagccgctgctgaccaaaagagaaagagaagtattcgaattgctcgttcaagacaagacaacaaaggaaattgcaagcgagctatttatcagtgaaaaaactgtacggaatcacatttcaaatgccatgcagaagttaggtgtgaaagggcgttcgcaagctgttgtcgagcttcttagaatgggtgagctagagctctgattcttgccggttttccttcttttcgagaaggagccggttatttgcgttggcgcccgggctgatgggcatgcggtaaaatcccggttttcctttttctccgtcagtcttgcattttcttaaaaaaagaaggaaaatagacacggagcgcatagcccagaaagatccttgagtgagggatggacaaatgacatcaaaatctgtagagcatgttgcggatatcgaaaaatcactccgccatatcgctgcgatcattaaacaaaaaggaagagaaatccttaaccaatatgcaattacaccgccgcaattcgtggggcttcaatggctttatgaattgggggatatgacaataggcgaattatcaggcaaaatgtatttggcttgcagcacgacgacggatctgatagaccgcatggaaaaaaataggcttgtcgagcgggtcaaagacccggctgacagacgggtcgtcagaattcatcttctcgctgaaggagagcgcattatccaagaagtgattttgaaaagacaggcttatttgcgggatatgtttgcgacattttccgaagaagaaacagccgctttcgaaaaatcattattgaaactgcagcatgaaatgaaaagaaaatgaggcgattttgttggaacagccgataggagtcattgattccggggttggcgggttaaccgttgctaaggaaatcatgagacagctaccgaaggaaaatatcatctatgtgggagatacaaaacgctgcccgtacggcccgcgtcctgaagaagaagttcttcaatacacgtgggaaatgaccgattacctgctggaaaaccaccatatcaaaatgctcgtgatcgcctgcaatacggccacggccattgccttggaggatattcagcgcaaaacggatattccggttgtcggcgtcattcagccgggtgcgagaacggcgataaaggtcacgaaaaaccagcatatcggcgtcatcggcacggtcaataccattaaaagcagagcgtatgagcaggcgctgctcgggttaaacgcagaacttcaagttgagaacacggcttgtccgctgctcgtgccgtttgtggaaagcggacggtttcttcaggaatcagcggaggaagcggttgaagcatcgcttgagcctttaaaaggtacatcaattgacaccttgattttaggatgtacgcattatccgattttaaaagatccgattcagaactatatgggagagcatgtgaaaatcatttcctccggagacgagacggcgagagaagtgagcaccatcttgtcttataaaggtttgttaaaccaatcgaaacatgcaccggagcatcaatttcttacaacgggagagcggaacggcttcgcaaaaattgccgaagactggttcggccacgaaatcggccatgtcgagtgcatctcccttcaagagccggtcagaaaataaatcaaaaaacccgctgtttacggcgggtttttttgcgcttcccggtctatttcccggatagggctcgtatacatcatagtacaaacagccttaggagggaaaagtatgctgaaaaaaggacctgcagtcattgctgcaacatgtcttacttcggcttttgtgttatctggatgcggtttgtttcaatccgataaaacagccggggaaattgacccgcctcaagacatttcatatgtaaaggatgaagcgggaattcaggcaaaaccaaagcagtcagagaaaaacggtacttctaaagccgaccagccggccaatacagtcatgcgagagctgtatctgattgataaaaacggctatgtcgcagcacagacactgcctcttccgaacagtgagggaaccgcaaagcaggcccttgagtatttggttcagggagggcctgtgtcagaaatcctgccgaacggcttcagagcggtgctccctgcggatacgacggtaaatgtcgatattaaaaaagacggcactgccgtcgctgatttttcgaaggaatttaaaaactataaaaaagaagacgaacaaaaaatcctgcaatcgattacatggacgcttacccaattcagctcaatagataaagtcaaaatcagaatcaacgggcacgagctgaaagaaatgcctgtgggcggcacgccgattacgggcgacttaagcagaaaagacgggattaatattgaaacggccggagtgaatgatctgacagacacccacccgctgactgtatattatctggcggaaacagagacgagcgaatactacgtgcctgtcacaaagcggattgacaattcggaaacaaatgacatcaccgctgccgttgaacagctcgccgacggaccgggcaaagcaagcgggcttttgacggactttaataacgatgttaaacttctcagcaagccgaaagtgaaagacggccaggttacactggactttaacagctccatttacggaagcgccgacgaaaaaacaaaaatggtatcatcgggcgtactggacagcatcgttctcacgttaaccgaacagccgtcgatcaaaagtgtttctataaaagtaaacggaaaatcagaactggtgaatgaaaaaggagaatccctttcaaaacctgtttcgaggccgtcacaagttaatacgggtagtttttaatttgcgatttttgatatactagtaaaaaagaggttagcgttccggctgcctctttctttattcacaatccggaacaaaaggtttatgtacatataatcggaggtaaaatatgagacacgacggaagacagcacgatgagctgcgccctatcacatttgatttggattttatcactcacccggaaggctctgttttaattacagcgggaaatacgaaggtcatctgtaatgcatctgtggaagaccgggtgccgccatttttacgcggcggaggaaaaggctggatcacagcggaatacagcatgcttccccgcgcgacgaatcaaagaacgataagagaatcttcaaaaggaaaggtctccggcagaacgatggaaattcagcggctgatcgggcgcgcgctccgggccgtcgttgatttggagaagctcggcgaacggacgatctggatcgactgtgacgtcattcaagctgacggcggaacaagaacggcttccattaccggcgccttcttggcaatggccattgcgatcggcaaactcgtaaaaagcggcgttatcaaaacctctcctgtgacagattatctcgcggccatttctgtcgggatggataaagaagaaggccttcttttggatctgaattatgaagaggattcggcggctgaagtcgacatgaatattatcatgacgggaagcggacgttttgtagagcttcaagggacgggcgaagaagccacattctcccgtgaagatttaaacggactgttaagtcttgccgaaaaaggaatccagacgcttattcaaaagcaaaaagaagtgctgggagaaatattgcctgaactgaaataagaaagagaggcctgatcaccgtgaaagaagccattattgcgacacataatcagggaaaagtgaaagaattcaaggaaatactcgaaccgaaaggctacagcgtctcttctttggcggaaatcggatttacggaagaaattgaagaaaccggacatacctttgaagaaaacgccatcttaaaagcggaagccgtggcaaaagccgtaaacaaaatggtcattgcagacgactccggtttatcggtggacaaccttggaggcagaccgggcgtttattcagcccgttatgccggagaagcaaaagatgataaggcgaatatggacaaggtgctgtcagaattaaaaggcatcgaaaaagagcagcgcacggctcgtttccgctgcgcccttgccgtcagcatgccggggcaggaaacaaaaacggtcgaaggtcatgttgaagggtatattgcggaaggacccgagggggataacgggttcggctatgatcccatttttattgtgaaagataaagataaaaccatggcccaactgacaagcgctgagaaaaacaaaatcagccacagggctgaggcgctcaagaaactgtcaaagctgcttgactcataagggggagcgtatgcaatgaaagtgctgataataagtgacagtcacggccttgaagacgagctggagacgattgcaaagcggcacgaagacgaagcggatctgatgattcattgcggtgattcagagcttgacgccgcacatccggcgcttacgccgtatcacacggtgaaaggcaattgtgactttggcggcgggtttcaggatgaactccttctggacgccggctcaaagaaaattctggccgttcacgggcatcttcacggcattaaacagtcacttttaactgttttttaccgggcggaagagcttggggcggatatcgtctgcttcggccattcacatattgccgggagtgaagtgctccggggcaagcttttgattaatccgggcagcatccgtcttcctagagtccgcaatgtgaaaagctatgccattcttactcttacagaaagagaaggcgccgtgacattttacgacgaaacgggtcgggaattgaaggacttggggaatacaatcagtttttaacaagtgatgggggagatttcattcttccccatcaaaagtttttaaaaaaatattgacttatgatttgaacctgtatataataaatcttgtcgctgatacataaagcaaaagctgtcccagtagctcagctggatagagcaacggccttctaagccgtcggtcgggagttcgaatctctcctgggacgtacaaaaaaagagctggtgacatcagagtgaaaactgatgccgctggccttttttatcggatgactatattgtcaattcgctgatatcatggtaaaatgatcagcagatatttgtttttcatgtcccagtagctcagccggatagagcaacggccttctaagccgtcggtcgggagttcgaatctctcctgggacgtataaaaaaacctcaagccctgacaatgggtttgaggtttttttgtactttattttttattttacgaaacaaaagttccgtatttgatgaaaattgtaaagtaattttaatataaatgaaacttaacgtaatatttaccgtaataaatatatgtataaagatacttaaggcgcccttgattgataaattatctaatttctatcatacattttgtcaataatcgatagaaagacagcgggaggaattagcttttgaagtacgcatttgcatataaaaatcacaatatagaaacgatcttttgcggaaaagacgagctgtttgaggaactgaagcaatttttaatcactcaatgcggtttaatcattgttgaggtttcaagggctgattactatacggagcaggaaatgaatcagtggaatgaccgttatactttgtgaataagaaaagaaaccggccgtgtgagaccggtttttgtatcatctgaatccgctcggagcgctgaagccccctgcgtggccgctgaaaccgcctccgagcgcgccgggatggacccctgcgccgaggcttccgccgacgtcactgaaggtttggccgtagtacccggatgtataagggtatgggacgaattgctgcccggcgaatgacagcgtgctttgcggggtctgctgtccgtatccggatgacgggaatccctgctgaaaagaagggccgccttgatatggtgctgtatgcatcggggccggaggatagtaagactgcggcggtaagaccggtaaaggcggaaatccaggaggcaggccctgcatgcctgataacatcttattcatgacatcactcatttcttacgagataagaacagtgtatgcgtatatctgtataaagagcctgttcaatcgaacggaatatctgacaagtaagccggaaggacagagaaaaatcgtgtaataaaatgtgacatattcgtatatgaacggaaaaatttcatgtaatcttgagagattaataaaaaaatgataaaaacttttaatatttacagatccctttgtaccagtaatgaaagcgtatacaaagtagattgattaatctaaattgtctaataattataaaaatgctgttgacactgtctgcaaacgggcgtaatatgagttcaaacaaaaataaataaatgattcacgctaaaaagaaaaatcataaaacactgaaaaaacaaacaaaagaaggttcttttttaataaaagagctgccataataaaaagcgcagaagaggataagtagctttgctgaagtttttcacagagagccggtaacgctgagagccggtaaaacaaatcaaagtgaactcccctcagagtgccggtctgaaatatgaagagtaggactcggccgagtgaacgcaatgtttactcgttatcaaaacggatattcattatccatgagacggtctgcatatgaccgtaaacaagggtggtaccgcggagagcaaagccttttcgccccttttggctatcgcatgaaatgcttggctgaatgtgggtgggaaggcttttttatttgcgtcagccggcgctgcgttttatgaattggattttagaagggaacattgaaaaggaggaactgaaaatgggcacaaatgtacaggcggattctttgtctgccgattgtacaaaaacaatgaacggggctctgatgctgattgaatcattaaagaaagaaaatgtcgagatgatcttcggctatccggggggagccgtccttccgatttacgataaactgtatcaatcagggctggtccacatcctgccccgccacgagcaaggcgcgattcacgcggcagaagggtatgcgcgaatctccggaaagccgggggttgtgattgcaacctcaggacccggcgcgacaaatttagttaccggtcttgcggatgcgatgattgattcactgccgctcgtagtgtttaccgggcaggtggccacttcggtcatcggcagcgacgctttccaggaagccgacattttaggaattacgatgccgattacgaaacacagctaccaagtccgccgtccggaagatctcccccgtgtaattaaagaggcgttccatatcgccacgacgggaagaccgggcccggtattaattgatataccgaaggatgtcgcagcatttgaaggagagttcagatatgatcatgagatcagccttccgggttatcagccggtaaaagagcctaactatctgcagattcgaaagctcgtagaagctgtcagtagtgcgaaaaagccggttattttagccggagcgggtgttttgcacggtaaagcttcagaagatttaaaaaattatgttgaacagcagcaaattccggtagcgcacacgcttctcggtctgggcggtttcccggcagaccatcctctatttctgggaatggcggggatgcacggcacatacacagcgaacatggcgctttaccactgtgatttgttgatcagcatcggagcgcggttcgatgatcgtgtgaccggaaatctgcagcattttgcaaaatcggccaaagtagcgcatatcgatattgatcctgctgaaatcggaaaaattattgaaacgcagattccggtggtcggcgacagtaaaatcgtccttcaggaattattgaagcaaaacggaaaacagggacagacagaggaatggaaacagcagctttcagaatggaaagaagaatatccgctttggtatacagacaacagagaagagggcttgaaaccccaaaagctgattgagtatattcaccaattcacaaacggagaggcgattgtggcgacggatgtcggccagcaccagatgtgggcggctcagttttatcctttccgaaaggctgataagtgggtgacctcgggggggctcggcacaatgggcttcggccttccggcggctatcggagcacagctggctgaccgtaacgccacggtcgttgccatcctcggagacggcggttttcagatgacccttcaggaattagatgtcatccggcagctgaatcttcctgtcaaagtggttatcttgaacaacgaatgtctgggcatggtcagacagtggcaggaaatcttctatgaagaacgctactctgaatccaaattctcggcgcagcctgactttgtcaaattgtcagaagcctacggcattaaaggcatccggatttcatcggaagaagaggcggaagaagagcttaaaaaggcgctttcatcaaaagaaccggccgttattgacgtccgggtcgccaaaagcgaaaaagtattcccgatgattgcgccgggtaaaggacttcatgaaatggtgggggtgaaaccttgaaacgcattatcacattaacggtggtcaaccgctcgggagtattaaaccggatcaccggcctgtttacaaaaagacactataatatcgaaagcatcactgtaggccacacggaaacaagcggtgtttcaaggattacatttgtcgtccatgtggaaggcgaaaatgacgtagagcagctgacaaagcagcttaacaaacaaattgacgtcctgaaagtgacggatattacaaaccaatcgattgtacagcgtgagctggcattaatcagagttgtttccgcaccgtcggccagaacggaaatcaatggaatcattgagccgttcagagcttccgtcgttgatgtctcaagagacagcatcgtcgttcaggttaccggcgaatctaataaaatcgaagcgctcatagagcttctcaaaccttacggcattaaagaaatcgcgagaacgggcacaacggcttttgcgaggggaacccagcagaaggcgtcatccaataaaacaatttcaattgtataacacaaaaaagggagagattaaaatggtaaaagtatattataacggtgatatcaaagagaacgtattggcgggtaaaaaagtagcgattatcggttacggttcacaaggtcatgcacacgcgctgaacttaaaagaaagcggaattgatgtcattgtcggcgtcagacaaggaaaatcatttacacaggcccaagaagacggtcataaagtcttttcggtaagagaagcggctgcccaggctgatatcattatggttcttcttccggatgaacagcagcaaaaagtatatgaagctgaaatcaaagatgaattgacggcgggcaagtcattggtattcgcacacggatttaacgtccatttccatcagatcgtgcctcctgctgatgtggatgtattccttgtcgcccctaaaggaccgggacaccttgtcagaagaacatatgaacaaggcgcgggcgtaccggcattgtttgccatctaccaggatgtatcaggcgaagcgaaagatacggctcttgcttatgcaaaaggaatcggcggagcgcgtgcgggcgttcttgaaacaacatttaaggaagaaacggaaacggatttgttcggtgagcaggctgttctgtgcggaggtttaacggcgcttgtcaaagcgggttttgaaacgctgacagaagccggataccagcctgaactcgcatacttcgagtgtctgcacgaactgaagctgatcgtagacttgatgtatgaagaaggattggcgggcatgagatactctatctccgatacggctcaatggggagattttgtatcaggaccgcgtgtagtcgatgcgaaggtaaaagaatcgatgaaacaagtattaacagatattcaaaacggtacattcgcaaaagaatggatcgtggaaaaccaagtgaaccgtcctcgtttcaatgcgatcaatgcaagtgaaaacgagcatcagattgaaaaggtcggcagacagcttcgtgaaatgatgccgtttgtcaaacaaggcaaaaagaaggaagcggtggtctccgttgcgcaaaattaatgttttcgacacgacccttcgtgacggtgaacaatcccccggggtcaacctcaattcccgggagaaactggcgatagccaagcagcttgaaagactcggggtggacattattgaagcgggatttcccgcttcatcccgaggtgattttttagccgtgcaggaaatcgcaagaacgattaaaaattgttcggtaacagggcttgcccgatctgtcaaaggtgacatcgacgcagcctgggaagcgctgaaagacggggccagcccgcggattcacatctttatcgccacctctgacattcatctgaagcataagctgaaaatgacgcgggaagaggttaaggaaaaagcggttgaaatggtgaagtatgcaaaagaacgctttccgatcgttcaatggtcagcggaagacgcatgccgcacagaacttccgtttctggctgaaatcgtagaaaaagtgattgatgccggcgcgagcgtcatcaacctgccggacactgtaggttacctgacgccggctgaatacggaaacatctttaaatatatgaaggaacacgttccgaatatcagccgggtaaagctctcagcccattgccacgatgatctcggaatggcggttgccaactcactttcggcaattgagaacggcgctgatcaaattgaatgcgccattaacggcataggagaaagagccgggaacgccgcgctagaggaaatcgccgttgcgcttcatgtcagaaatgacgcgcatcaagccgattcatctctcaatcttcatgaattgaagcggacgagtgatcttgtcagcaaactgacgggcatggccgttccccgcaacaaagcaatcgtcggagataacgctttcgcacatgagtcgggtattcaccaagacggtttcctgaaagaaaaatcaacatatgaaatcatttcaccggaacttgtcggcgtgactactgatgcgctcgtactcggaaagcattccgggcgccacgcgttcaaagaccgcctgaatacgcttggattccagtttgatagtgatgaaatcaataaatattttacgatgtttaaagaactgaccgaaaagaaaaaagaaatcaccgatgatgacctgatttctcttattttagaagaaaaagtgacggacaaaaaaatcggctatgaatttttgtctctgcaagtgcattacgggacgtctcaggtgccgactgcaacagtctctttgaaaaatcaggaaaacgaacagctgatgcaagaggcggcaacgggggcgggcagcgtagaagccgtttataatacgctcgggcgctgcatcgataaaaatattgaactgacagactaccgcatccaatccaaccggaaaggcgaagacgcgctggctcaggtttacgtcagagtgaccgtgaacggaaaagaatcatcagggcggggaatcgcgcaggatgttctggaagcttctgcaaaagcatatttgaacgccgtgaaccggcaattggtgctggattgcaatatagacggattaaagagacagactgcggtcggctcgtaatagaaaggagaacgtttgatttgaaaaaacgcattgctttgcttcccggtgacggaatcggaccggaagtggcggaatcagcggcagatgtattgaaaagcgttgccaaacaattcggacatgaatttgaatttgaaaacggactgatcgggggagcggccattgacgcccatcaaaacccccttcctgaggagacggtggctctttgtgaaagatccgacgccatcctgctcggggcagtcggcggaccgaaatgggaccaaaatcctccggagctcagaccggaaaaaggcctgctcggcatcagaaaaaaactcggcctgtttgccaatctgcgtcccgtgaccgtatttgaaagcttgtctgaggcatctccgctgaaaaaagaatatatcagcggcgtcgactttgtaatcgtcagggaactgacgggcggcctctacttcggagaaccgagcagacagtatgtcaatgaagcgggagaaaaggaagcggtcgatacccttttttataagaaagaagaaatcgaacgcgttgtcagagaagcctttaggatggctgccggcagaaaaggaaaagtgacgtccgttgataaggcgaatgtgctttcttcaagcaggctgtggcgggaaaccgcagaggaaatcgcaaaagaatttcctgacgtgacgcttgaacatatgcttgtcgataatgccgcgatgcagctcatctacgctccgagccaatttgacgtcatcgtaactgagaatatgttcggcgatattttaagcgatgaagcctccatgctgacaggctcgctcggcatgctgccgtcagccagtttatcaagttcaggtcttcacttgtttgaacccgtgcatggatctgcgcctgacatcgccggtaaagggatggccaatccgtttgcggcgattttatcagcggcgatgcttttgagaacatcattcgggcttgaaaacgaagcgcaggcggtggaaaaggcggtcgcaaaggtgcttgcagacggcagccgtacacgtgatatcgcccggggcggccaatatgccggaacgcatgacattactgaaaaagtaaaagccgcattagccggctcgaatacaaaatctatagtgtgacgctttaaagaaagcggtcttagttcataggtagagggaggaaacaaagatgatgcctcgaacaatcatcgaaaagatttgggatcggcatgttgtaaaaagcggtgaaggaaaacccgaccttctctatattgatctgcacctaattcatgaggtgacgtctcctcaggcgtttgaagggttaaggcagaagggaagaaaggtcagacggccgcagaacacattcgcgacgatggaccacaatattccgaccgtcaaccgttttgacattaaagatgaagtcgcaaagcgccaagtaaccgcgcttgaacggaattgcgaggagttcggcgtccgtcttgcggatcttcacagcgcagaccagggaatcgttcacgtagtcgggcctgagcttggtctgacactaccggggaaaacgatcgtttgcggagacagccatacatcgactcacggcgcgttcggagcgcttgccttcggtatcggcacaagtgaggtggaacatgttctttccactcagacattgtggcagcagcggccgaaaacgcttgaaatccgcgttgacggaacgctccaaaaaggagtgactgcgaaggatgtcatcttgtcggtcatcggaaaatacggggtgaaattcggtactggatatgtcattgaatacaccggggaagtattcagaaacatgtctatggacgaacgcatgaccgtctgtaatatgtcaatagaagcgggagcacgggcgggactgatcgctcctgatgacacgacgattgaatattgtaaaaaccgtaaatacgcgccaaaaggcgaggaatttgaaaaagccgccgcagaatggaaagcgttaaaaaccgatccgggcgccgtatacgatcattccatcgtgttagacggcagcgagatttctccaatggtaacatggggcgtcaatcccggcatggttctcccggtcgatgcccaaataccggcgccggaaacgattgattctgaagacggtaaaaaagaagccatccgcgcgtacgaatacatgggaatctcaccgaatcaaaaaattgaagatattaaagtcgagcatgtgtttatcggctcctgtacaaattcgcggatgaccgatcttcgccaggctgcggatatgatcaaaggccgaaaagtcgccgacagcgtcagagccattgtagtgccgggttctcaaagcgtgaaacagcaggccgaagaagaagggctgcaccgcgtgtttctcgaggccggatttgaatggagagaatcaggctgcagcatgtgcctcagtatgaacaatgatgttgtgcctgaaggggaacgatgcgcttccacttccaaccgcaacttcgaaggcagacagggaaaaggcgcgagaacacaccttgtcagtccgacgatggcggcaatggcggccattcacgggcatttcgtcgatgtaagaaagttttatcaagaaaaaacagttgtgtaaggagtgcgcgaaaagatggaacctttaaaaacgcatacgggaaaagcggctgtcttaaaccggatcaacgtcgatacggaccagattattccgaaacagtttttgaaaagaattgaaagaacaggatacggcagattcgcgttttttgattggagataccttgagaacggtgagcctgatcctgaatttgaattaaaccgcaaagtctatgaaggcgcgtccatattaattgccggagagaatttcggctgcggatcatcccgtgagcacgcgccttgggcgctggatgattacggcttcaaaatcatcattgctccgtcatttgccgatatttttcatcaaaactgttttaaaaacggtatgcttcccatccgtatgccgtatgatcagtggaaaaaactcgccggtcaatatgaaaatcagtcccttaacatgacagttgatttggaaaaccagctcattcacgacagtgaaggaaaagagatttcatttgaagtcgatccgcactggaaggaaatgctgattaacggttatgatgaaatttcattaacgcttctgctggaggacgacattcagcagtttgaatcgaaaagaagttcttggcttcaagcctgaaaaaagccgaccggcatctgtccggcggctttttttaccgtgcgcaccatcctttcttgtgtttcctgacgcgtgttgatacacttgaaaaaaatagcgcctgaaaggaaataaagtatgacgcatgacaagaaaaaagctgatatcattcctttcccccgtctgaaagaacgcttggttgataaagggatggccgccatgaaggataaacagtatcaggaggccctcgaactgttctcagaggcggtaagccacggcgataccgagtccgacgtacatttaggcatggcgatttgttttctggaactcggggaattggaagaagcaaaacaagtttgcgagaaaatgctgaatgaagggtacggccattatttcaccgtactgcaggtgtacatgaccattttaattcagctgaaacaatatgaagaagtcaaaagcacaattgaagctgtgctggaagaaaaccagctgcccgcagaaagtgcggagcaattctaccggctgctcgaattcagccgcaaaatgaccgatcccgaccagcaggatgaagcgtgggaggaggaatacgaggacattcttgatgcggaaaaagtgctgaacagccccgctgaacaaatgaatctgattcattctctcaaagaccgcaatattgcaaaatacacgggtctcttaaaaacgattcttcaagatccgggcgcgcatccgcttatcaagacgatgattttgacgctgatggcggagcacgactacagcaagccggttcatattacaaaattcggcgattcaatgaccgcggttccgagtgaaacggttcagcctgatgcggctccggttttgcatcgcgttctccgggtgcttgatgaaacgctcggcaatgaaaaccctacattatacgctgccgtcgaggagctgtggagaaggcatctgtacgtcctgcacccttttatgccgaagtttttgaacgcagatttatgggcggcggcgcttcataaggtcggttacgagatgcacggcattgacattgagccggaggaacttcatatgatgtacgagtttgacagccgcgaacttgaagaagcctgcacgatgattaaggatattgaagaaatttcttatttgtaaatcacaccatatagttgaaagcggtaggcgttatgttataatatagtggttgtatttatgtatagcggtttaactgaaatgagaattacggttggacaggctgccagttcattacataatgattctgattcaaagcggttttttctttgacaaagccgcggattgctttagaatggaagaccgacacaacctgaatagatttttggagggaaacacatgtctgtaaaatgggaaaaacaagaaggcaacgaaggcgtattaacggttgaagttgatgcggatacgttcaaaacagctcttgatgatgcatttaaaaaagtagtaaaacaggtttctattcctggattccgcaaagggaaagttccccgcggtttattcgaacagcgtttcggcgttgaagctctttaccaggatgctttagatattttacttcctgtagaataccctaaagcggttgaagaagccggcattgagcctgtagaccgccctgaaatcgatgttgaaaaaatcgaaaaaggcgaaagcttgattttcactgcaaaagtgactgtgaaaccggaagtgaaacttggcgactacaaaggcttaggaatcgaaaaagatgacactgccgttactgacgaagatgtacaaaacgaacttaaagcgcttcaagagcgtcaggctgagcttgtcgtgaaagaagaaggcgctgttgaaaacggcgatacagtcgttcttgacttcgaaggtttcgttgacggcgaagcgtttgaaggcggaaaagctgagaactactcacttgaagtaggatcaggttcattcatcccgggcttcgaagagcagttaacaggccttgaagcaggcgctgaaaaggatgttgaagtaacattccctgaagagtaccacgctgaagagcttgctggaaaaccagctgttttcaaagtgaaaattcatgaaatcaaagcgaaagagcttcctgagcttaacgacgaattcgcaaaagacattgacgaagaagttgaaacgcttgctgaattaactgagaaaacaaaaaaacgccttgaagaagcaaaagaaaacgaagctgacgctaaattgcgtgaagagcttgttctgaaagcatctgaaaacgctgaagctgatgttcctcaagcgatgatcgacactgagcttgaccgcatgctgaaagaattcgaacagcgtctgcaaatgcaaggcatgaaccttgagctttacactcaattctcaggccaagacgaaaacgcgttaaaagagcaaatgaaagaagatgccgcaaaacgcgtaaaatcaaacctgactcttgaagcgatcgctcaagctgaaaaccttgaagtaacagacgaagaagttgaagctgagctgactaaaatggctgaagcttacaacatgccggttgaaaacatcaagcaggcaatcggttcaactgacgcgatgaaagaagatttaaaagttcgaaaagcaattgattttcttgtagaaaaccgttaatatggttcataataatagacataataaaacagggcgcgattaattcgtgccttgttttgtacaattatgatataactctttttcttggggcaagatagtcattgccgggctgtttttcgtcatacatatagaatgtgcaagtgcgaaacacattgttaccgtcttactggaaagtatggtaaaatgcaatacatactcgatcgtagcaagaaccgttttcttttgcccttcaggtaaaagaaaaagtgagacaagattaaggggtgaaagaatgtttaaattcaacgaggaaaaaggacaattgaaatgctcgttctgcggaaaaacgcaagatcaggttcgtaagctggttgcaggaccgggtgtatatatatgcgacgaatgtattgagctctgtacagaaatcgtagaggaagagcttggtacggaagaagaagtcgaatttaaagacgttccgaagccgcaggaaatccgtgagattctaaatgaatatgtcatcggacaggatcaggcgaagaaatcacttgcggttgcggtatacaaccattacaaacgcatcaattccaacagtaaagtggatgatgtcgagctttctaaaagtaatatttctttaatcggaccgactggaagcgggaaaacactccttgcccagacgcttgcgcgtattctgaacgtgccgtttgcgatcgcggacgctacatctctgactgaagctggatatgtcggtgaggacgtagaaaacatcctcctcaagctgattcaggcagcagactatgatgtggaaaaagcagaaaaaggcattatttatatcgatgaaatcgataaagtagcgcgaaaatctgaaaacccgtccattacacgcgacgtatcaggcgaaggcgttcagcaggcgctgctgaaaattcttgaaggaacggttgcaagcgtaccgcctcaaggaggacgcaaacatcctcatcaggaattcatccagatcgatacgacgaacatcctgttcatttgcggcggtgcatttgacggcatcgaacaaatcatcaaacgccgtctcggacaaaaagtcatcggcttcggctctgataataaagcggcagaccttgaaaaagaagaactgctttctaaagttcttccggaagacttgctccgtttcgggctgattcctgaattcatcggccgtcttcctgtcattgcaagccttgagcagcttgacgaaacggcactggtcgaaattctgactaaaccgaaaaacgcactcgtcaaacaataccagaaaatgttagagcttgatgatgtcgagcttgaatttgaagacgaggcattatctgaaattgcgaaaaaagcgatcgagcgaaaaacaggcgcacgcggcctgcgttctatcattgaaggcatcatgcttgacgtcatgtttgatctgccgtcccgagacgatattgaaaaatgtgtcattaccggagcgacagtcgcagacggtgaagcaccgcgtcttgtattaaaagacggcacagttgtcggccaagataaaacatcagcataacatgacaaaacctcctgactcgaattgatcaggaggtttttttcttgtcctgacccttctgaaaatgtttattccgggctttgctgggagatactagcggacagaggaatgaattggatacataaatcgttttttcaggagggaccagcatgagttggacagggatcgcattatttgtacagctgtttttcgggatagtcatcggattatatttttggaatctgctcaaaaaccagcgtacacaaaaagtgacgatagataaagaatcaaaaaaagaaatggaacagctgcgcaaaatgcgcgccatcagtttatcagaacctttatcagaaaaggtgcggccgaaaagctttcaggacattgtcggccaggaagacggaattaaagcgttaaaagcagcgctttgcggaccgaacccgcagcacgtcattatttacggtcctccgggagtcggaaaaacggctgcggcgcggctggtattggaagaagcgaaaaaacataaacagtcaccgtttcaaaagcaggctgtttttgttgaacttgatgcgacgaccgcgcggtttgatgaacgggggattgccgatccgcttatcggttcagtgcatgatccgatttatcagggagcgggtgcgatgggccaagcaggcattccgcagccgaaacagggggctgtgacccatgctcacggcggggtattgtttattgatgaaatcggcgagcttcatccgattcagatgaataaaatgctgaaggtgcttgaagatcgaaaagtatttttagacagtgcgtattacagtgaagaaaatacgcaaataccgaatcacattcatgatatttttcaaaatgggcttccggcagatttccgtttgatcggagcgacaacgagaatgccgaatgaaattccgccggccatccgttcgcgctgtcttgaagtatttttccgcgagctggaaaaggatgaacttaaaatcgttgcgaaaaaagcagccgacaaaattcagaaagagatttctgacgaagctctcagtgtgctgaccacatatacgagaaacggacgtgaagccgtcaatatgatccagatcgccgccggcatggcggtgactgaggacagacaagaaattacgacagaagatatagaatgggttgttcattccagtcagcttacacctaaaaatgagcagaaaatcgccgatgaaccgcaagtcggcatcgtgaacggacttgctgtctacgggccgaacagcggcgcattgctggaaatcgaagtgaatgtcacacctgcgcaggacaaaggaagcctgaatatcacgggaattgcagaggaagaaagcatcggcagccaatcgaagtcgatccgccgcaaaagcatggcgaagggatctgtagaaaatgttctgacggttctgcgcacaatgggcatcaaaccttcagactatgacattcacgtcaattttccgggcggaggcccgattgacggaccttcagcaggtatcgcgatggccgcggggattttttccgcgattcaccgcatcccgatcgaccatacggtggcgatgacgggagaaatcagcctgacggggcttgtcaaaccgatcggcggcgtcattccgaaaattaaagccgcaaaacaggccggagcaaaaacggtcattatcccatatgaaaatcagcagtccattctgaaacgaatagacggaatcaccattaaagcggtaaaaacgttccaggaagtgcttgacgtcatattggttgaccctccttcagaacaaaaaccgtttgatatccaaatgaataaagaatccgtataaaccccatttttataatggggtttttttatggaggacatcttttcctttttcagaacagaaagaaagggtatactacgaagagactgttttatatacagggcaggcggataagccgattttgcccgatcccggaattgtacaacgatgaaaaagttgtattataatggttcatactaaagtcacggaggtgtcagtcacatggcagaagatacaaaacgcagcatcccgctcctccctttaagaggcttattggtatacccgacaatggttttacatttagatgtaggccgtgacaagtcggttcaggctcttgaacaggcaatgatgcatgatcatatgatttttttagccactcagcaggatatttcgatagacgaaccgggtgaagaggatattttcgccgtcggcacttatacaaaaattaaacagatgctgaagctgccaaacggtacgatcagagtgcttgtagaaggaattcagcgggcgcagatccttgaatacaccgagctcgaagattatacttcggtcgatatacagctgatgcatgaggatgattcaaaagacgtggaagacgaagcgcttatgcggacgctgctggaccattttgaccagtacataaaaatttctaaaaaaatctccgcagaaacgtatgcggctgtgactgatattgaagagcccggcagaatggcggatatcgtcgcttctcatctcccgctgaaattaaaggacaagcaggacattttagaaacggcggatattaaagaacgtctgaataaggtcatccgttccattcataatgaaaaagaagtgctggagattgagaaaaaaatcggtcagcgcgtcaaacgttcgatggaacgcactcaaaaggaatactacttgcgtgaacagatgaaagccattcagaaggagcttggcgacaaagaaggaaaaaccggcgaagttcagtcgctcacggaaaagatagaagaagcaggcatgcctgagcgtgtcaaagaaacggcgcttaaggaattaagccgttacgaaaaagtgccgtcaagctcagcggaaagctctgttatccgcaactatattgactggctcatcgcccttccgtggtcggatgaaacagaagataaacttgatattaaaaaagccggggaaatcttagataaagagcaccacggcttagagaaagtgaaagagcggattttggagtatttggccgtgaaacagctgacgaaaacgctgaaagggccgattctttgtctggccggacctccgggagtcggtaaaacatctcttgcaaaatcaatcagtacgagcatggggcgccgttttgtgagaatttcactgggcggagtgcgcgatgagtctgaaatccgcgggcaccgacgtacatacgtcggagcgatgccgggccgtattatacaggggatgaaaaaagccggcaaacaaaatccggtctttctcctggatgagatcgacaaaatgtcgtctgatttcagaggcgatccgtcttcggcgatgcttgaggtgctggatccggaacaaaacagtacattcagcgaccactatattgaagagacgttcgatttatcgaaagtgctgtttatcgcgactgcgaataaccttgcttccataccgggacctctcagagacagaatggagattatcagcctgtcaggctacactgaaaacgaaaagctggagatcgtgaaagaccacctgcttccgaaacaaatcaaagagcacgggctcacaaagagcaacctgcagattcgggatcaggcgattacggacatcatccgctactatacgagggaagccggcgtgagaacgcttgaacgccagattgccgccatttgccgaaaggctgcgaaagccattgtgtctgaggagagaaaacgcattaccgttacagagaaaaatctggccgactatctcggaaaacggatattcagatacggacaggcggaaaccgaagatcaaatcggggttgtcacggggcttgcgtatacgacggtcggcggagatacgctgtcaatcgaagtgtcattgtcaccgggaaaaggaaagctgattttgaccgggaagcttggagatgtcatgcgggaatcagcgcaggccgctttcagttatgtccgctcgaaagcggaacagttcggaatcgacccgaaattccatgagaagtatgacattcatatccatgtccctgaaggggcggtgccgaaagacggcccttctgcaggaattacgatggccacggcgctcgtttcagcattaacggaccgtgcggtaaaacgcgaagtcggtatgacgggagaaatcacgctgcggggccgcgtgcttccgatcggcggactgaaagaaaaggcgctcggcgcgcacagagcgggcctgaccactattattgcgcctaaagataacgaaaaagatatagaggatattccagaaagcgtcagagaaggactgaagtttatattcgtttctcacctggatgacgttttggaacatgccttagtaggagagaagaaatgaaagtcacaaagtcagaaatcgtgatcagcgcggtcaaacccgaacagtaccctaatggggggcttccggaaatcgcgctggcgggaagatcaaatgtaggaaagtcatcttttattaattcattaatcaatcggaaaaacttggccagaacgtcatcaaaaccggggaaaacacagaccttaaacttttacatcatcaatgatgaattgcattttgtcgacgttcccgggtacggatttgcgaaagtttccaaaagcgagcgggaagcatgggggagaatgattgaaacctatatgacgacccgtgaagagctgaaagcctgcgtgcagattgtcgacctcaggcacgcgccgtctgctgaagacgtgaacatgtatgaattcctgaagtattacggcattcccgtcatcgttatcgcgacaaaagcggataagattccaaaaggaaaatgggacaagcacttaaaggttgtcaaacagacgcttgatatggatcctgaagatgagctgattttattttcctctgaaacgaaaaaaggcaaagatgaagcatggggagccattaaaaaaatgatcagccggtaatgaaaaacccaaaacgcagtgcgttttgggttttatcgtatagttttgttccgcttgataaacaataataaaaggctgattccgatgaaaacatacggccagtatgttttgaagtgttccgtcggaatatggacggactccagccacgccgtaatttgtttaaagaagtataaaaagagggaaaaaccaatcatggcaaccgcttcgtatacatattcttttctggctgccgcaaataaggagaatccgaagacgaagagaatcatttcaaaatctcccggccaccatgagagctcaggtttggcgaaaaagtgtaaacctatgccgaaaagaagcatgccgatcaggacgtgaggcccggccgcttcctttttgccctggtacgagagcatggcgcccaagagcataaggagcaccggccattccccctgattcgcaaacaggtgaacctgtccgctctgaagccatgcgaataatgaagcggcaagcagaagtcccggtaataaaattgatgtttttttcatcctgtcacctacccgcagtaaaggatttttagtatgatgattacagtggaaacgagctttttatactatagcacaacatttttgaaatctgttcacattttttccgaagaaactatgttataatcattctaaataataaattctatgttagaatgattataaataaattgcgatgtacgggggtgcatgaaagcgatgcatattcttgttgtgggagtagattataaatccgcccctattgaaatacgcgaaaaaataagctttcagccggatgagcttgcagaagcgatgctccgtttaaaagaagaaaaaagcgttcttgaaaacattatcgtgtcaacctgcaaccgcaccgaaatatatgcggtggtcgaccagcttcataccggccgttattatataaagacatttttatccgaatggttctcgctgccgaaagaagagctgtctccgtttctgaaattttatgagagcgacgcggcgatcgagcatttattccgtgtggcgtgcggcttggattccatggtcatcggagaaacgcaaatactcggccaggtccgctcgagctttaaaacggcgcaggcagaaaagacgatcggcaccattttcaatgagctgtttaaacaggcggtgaccgtcggcaaacgcacgcatgccgaaaccgatatcggcgccaatgccgtttccgtcagttacgccgccgttgaactcgcgaaaaaaatcttcggctcattgtcaaataagcacattttgattctcggtgcgggaaaaatgggcgagctcgccgcagaaaacctgcacggtcagggtatcggcaaagtaacggtcatcaacagaacgtttttgaaggcaaaagcgcttgctgaccgtttctccggagaagcgcgcagcttaaaccagcttgaacatgcacttgctgaagctgatattttaatcagttcgacaggcgcaagtaatttcgtcgtgtctaaagaaatgatggagagagcgggcagacagcggaaaggccgcccgttatttatggtggatatcgctgtgccgagggacctcgatccggcgctgaacgatcttgaaggtgtttttctgtatgatattgatgaccttgaaggaatcgttgaagccaacttacaagaacgccgtgaaaccgctgaaaaagtcgagctgtttattgaagcggcaattgttgagtttaagcagtggcttaatacgctcggcgttgtgccggtcatttcggcgctgcgtgaaaaggcgctgtccatccagtccgatacgatgcagagcattgagcgtaagctgcctcatctgacggtaagagagaaaaaacttctcagcaaacatacgaaaagcatcattaaccaaatgctgcgcgacccgattctgaaagcgaaagagcttgcggctgaagcggattcagatgaaaagctgaagctgtttatgcagattttcgatattgaggaagaggccggccgccagctggacaaaagcctggataaccgccagacggttcattcgtttcaaaaggcagaagcaaaaacgggcttacgtccgcttgtaagtgagtgagggctgtatgattgatacagcaatggcaagacttaatgaagcgacaattgttatttatgcagtaagcgtccttttttactttatagattttcttcaacacaaccggaaggctgggaaaatggccttctggttgctttctattgtctggactctgcaaaccgtctatctttcttatttcatgtggcagacgggcagatttccggtcttgaatattacagaggccctttacttttatgcgtgggtgcttgtcacgctctcacttgtggtcacgcagattctgcgggttgattttatcgtgtttttcacgaatgtcatcggtttctcgatgattgcgatccatacgttttcaccgacggatcagcattcggccgctttttccggccagctggtctcagagcttttggtcattcatattacaatggcgattctgtcttacggcgctttttccctttcttttgttttttcgcttctttatcagtttcaatattctttattaaagaagaaaaagtggggaaaatggctgttgagaattgaagatttgtcaaaacttgattatatggcttacgttttaaatgtcatcggggttccgatgctgctgttgagcctgatattaggcgtgatctgggcgtatgtgtcgctggaaacgctgtactggtttgattcaaaagtgctcggttcgtttattgtgctgcttttatacagctactatttatatatcagaatgattaaggaactgcagggaaaagtggcggcgttatggaattcagcatgttttctcgtgctgatgattaattacttcctgctcggaagcctgtcgcaattccattggttcagttaacgcacgcgcccaaacagattcgggaggaaagaaaatgagaacgattaaggtaggttccagacggagcaaactggctatgacccagacaaaatgggtgattaacaaattgaaggaattgaacccttcctataactttgaaatccgggagattgtcacaaaaggcgaccgcatcctcgatgttacgctgtcaaaagtgggcggcaaaggtttgtttgtcaaagagattgaacaggcgctgctgcatcaggagattgatatggcggttcacagcatgaaagacatgcccgccgttttgcctgagggtcttgtcataggctgcataccgaaacgtgaggatccgcgtgatgcgctgatttcaaaagggcatcaaaagctggacgacataaaagaagggggcatcatcggcaccagcagtttaagaagaagcgcccagattcttgctgaacgccctgatcttacaattaagtggatcagaggcaatatcgatacgagacttcaaaagcttgaaacggaagattacgatgctattattttagcggctgcggggctttcgagaatgggctggaaagatgatgtcgtatctgaatttctcgaaccggaccgctgtctgcctgcggtcggccaaggcgctcttgccattgaatgcagagagtcggatgaggagcttttgaagctgtttgcgcaatttaccgatgagtatacgcagcgcacggtggcagccgaacgggctttcttacacgcgatggaaggcggctgccaagtgccgatagccgggtatgcgtccgtcaatgaccgggatgaggttgaattggtcggtcttgtcgcgtctccggacggaaagacgatttataaagaaacagcggcgggacatgatccggaagaaatcggaaaacgctgtgcggcgatgatgtctgaaaaaggagccaaagcattaatcgacagtgtaaaacaggagctcgatcaggatggcaaatgaccttcctttacaaggaaagaccgtgcttgtcacccggaacaaaagacaggccgcaccgttccgaaaaaaagtggaggcgcttggcggaacggctgtttccgcttcgctgatcgcttttcaggaagcgctcccggatgaatgtgcggacagtctccgggaagacctttctgagccgggatggcttgtgtttacaagcgtaaacggtgtccggttctttttttcctatcttgatcggcacggtcttgcgctttcgggacggaaaaaaatcgcagccgtcggtgaaaagactgcgcgcgccctgaaagagcggggagcccggacggatgcgatgcctgacgagtatgtggcggaatgtctggctgatactttaaaacggcacgcatcagctgccgaacccatttcagtgataaagggcaatttatcacgcgatgtcataaaagcggagcttgagccgcttggctatcaaataagggaatgggtgttatacaataccattcaggatgaaaaaggcatggacgagctgagacgggctgcatcccgctctcattttgattttattacgtttaccagctcatcggcggtccatacgtttatgcacgcggtcggagacggagaaaaagcgtgggaaaacagcggtgcgagctatatcagcatcggccctttgacagagaaagcgctcttggaatacgggatctcatcccatgtgcctgacacttatacgattgaaggcatgctggacgtcatgtgcagcatgtcgggaaaggattgataatgatgaatcaaacatttaacagacaccgccgtttgcgcgcgaacgctgcgatgagagatttagtaaaagaaacacgtcttcacccttcagattttatttacccgttatttgtcgttgaaggactcgaaggaaaaaaagaagttccttccatgccgggggtttatcatgtatcactcgatttgttaaaggatgaaatggctgagctgatatcgctcggcattaagtcggtcatcgttttcggcgtgccggaagaaaaagacgcctgcggaacccaggcttttcatgatcacggcattgtgcagaaagggattgctgaaattaaaaagcattatcctgaaatgatcgtaatcgctgatacatgcctctgtgaatacacggatcacggccattgcggcgtcgtgagagacggagaaatcttaaatgacgagtcgcttgagctgctggcgcagacagccgtcagccaggccaaagccggcgctgacatcatcgccccttcaaatatgatggacggttttgtcacagtgatcagggaagcgctcgacaaagaaggattcacgaatattccgatcatgtcttatgccgtgaaatattcaagtgaattttacggtccgttccgtgacgcggctgacagcacgccgcagttcggagaccgaaaaacatatcagatggatccggccaaccgcttggaagcgctccgtgaggctgaatcagacgcggcagaaggcgctgactttttaatcgtcaaaccgtctatgtcatacttagatattatgcgtgatgtgaaaaaccgccatcacctgccgctggtcgcatataatgtgagcggggagtattccatggtgaaagcggcagcccaaaacggctggattaaagaaaaagaaatggtgctggaaattttaacgagcatgaaacgtgcaggagccgatctgattatgacgtatcatgcaaaagacgcagcaaaatggcttgctgagtaacgatttcatttgacgggagctgaggcagatgagaagctatgaaaaatcaaaagccgcttttaaagaagcgcagaaactgatgccgggcggagtgaacagcccagtgcgcgcgtttaaatcagttgatatggatccgatctttatgcagcgcggaaaaggatcgaaaatttttgatattgacggcaatgaatatatcgactacgtcctgagctgggggccgctcattttgggccacacgaacgaccgggtcgttgaaagcctgaaaaaagtagccgagaacgggacaagtttcggggcatctactgaagtggaaaacgaactggccaaattggtcattgaccgtgtgccgtctgttgaaatcgtgcggatggtcagctccggcacagaggcgacaatgagcgccctgcgtctggcaagaggatataccggccgcaacaaaattttgaaattcgaaggctgttaccacggccatggtgattcgctgctgatcaaagcgggatccggagtggcgacactcggccttccggacagcccgggcgtgccggaaggaatagcaatgaatacgattactgttccatacaacgacttggaaagcgttgcactcgcattccgggagtacggtgaagatattgccggggtcattgttgaaccggtagcaggcaatatgggcgttgttccgccgcaggaaggctttttacaaggacttcgcgacattacggaacagtatggcgcgctgctcatttttgacgaggtcatgaccggttttcgcgtggattataactgtgcgcaagggtatttcggcgtgacgcctgacttaacgtgtctcggcaaagtcatcggcggcggtcttcctgtcggtgcgtatggcggaaaagctgatattatggaacgaatcgcgccgagcggtccgatctaccaggcgggaacattgtcaggaaatccgcttgccatgacagcgggacttgagacgttacagcagctcacacctgaatcttaccaagaatttgtgaaaaaaggcgatatgcttgaagaaggcatttcaaaagcagctgaagcacatggcattccgcacacgtttaaccgggcgggttcaatgattggcttctttttcacaaatgagcctgtcattaactatgaagcagccaaatcttctgatttaaagctgttcgccaaatattataaagggatggccgacgcaggcgtatttctgccgccgtctcaatttgaaggtttgtttctctccactgcgcatacaatggaggatattgaaaaaaccattcaagccgctgagaaagtgttccaggcgatcagccgctgataccgaaaagccgatgcaagcaagacttgtatcggcttttttcaatgcctccattatcatatttccccggattgcggcatacacctttagtgacatctaattgtatggattagatgaaaggaggatatgaacttgccgcataatcaccgattgcaattttctgttgaagaatcaatctgtttccaaaaaggacaggaagtttctgaattactttcgatttcattagaccctgacatcagggtgcaggaagtaaatgattatgtctcaattaaaggatcattagaacttactggcgagtacaacatagatcacagcagtcattttgaagagcttgatagggaactgaggcatgtagaggaagtgagggcgagggaggatggcacggccgagctcattcattgtttcccggtggacatcacgattccgaaaaataaagtgagccacctcaatgatgttttcgtatttatcgatgcctttgattatcagctgacggattcaaggatcttaaccattcaagctgatttggcaattgaagggctgcttgaggaatccgagccaaaagagccggagatccctttgtacgtggcgcctgaatttgccagagaagaaatgatcaatcttgccggacatcattctgaggacgaaaacgaaccagaattaatgatacgccatgagcctgaaatacctttgactgtatcagaagaagcagcacaagaaaccgagaagaacgaggaagaaatcccgcctttaatcgggctggaggaagaagagcaggaagcagccccgattctgagggagcgggaagaagagcaggagactgccccgattctgagggagcgggaagaagagcaggagactgccccgattctgagggagcgggaagaagaagagcaggaagcagccccgattctgagagagcaggaagaagaagaacaggagactgccccgattctgagggagcgggaagaagagcaggaaactgccccgattctgagggaacgggaagaagaagagcaggaagcagccccgattctgagagagcaggaagaagaagagcaggaagcagccccgattctgagggagcaggaagaagaagagcaggaaactgccccgattctgcgggagcgggaagaggtgccgaaacctgtttcctttactgagcctcctcctcctgtttccttccaacacgaagaagagccggaagaagctgaggagcctgcaatcatgtcggctgtgaggaatgaacctgtatttgaggatgattcagcagaagtgcaggaagagccaaaagatgatatcgaaccggttttccctgcgttcactctgactccgcatgcggaaaaaccaaaaattgcggaacagcccttccttcaaaaagaagaacagccagaggccgagccgcttctccgtcagagcgatcatgaggcggcagaagacgaagatgagcctgcggtttttcaagaagagcaggcgcccgtttatcgcgagttcgttccggaacagcaggaagaggagttttacagcgctcctaagctgcttgaagaagaggctcaggatgaagaagggtttgaaattgaggtaaggaagatggcgcagccggaggaggaaaccgggaagcctctcgatttgtcatttcagttttccaaactgccgcctgaggagccggcgcaagctgaacagcctgagccgcttaagcctgaaagaaagaatgaagaagcggcaccgggaaccgagcagaaggaaaatgacaactctcattacttgacaaaattatttacaagggaagaagaaaagttttcaagaatgaaaatttgtatcgtacagcagcaagatactatcgaccgggtgtgtgaacgatatgacataacatcccagcagctcatcagaacgaatgctttatcgtttgatgacgagcttgaagaaggtcagcttctgtatatacctgaatataataacagccatgcgtaagcacaaagaggccgtaaaaatgtggtgaatggaatggaagcagtccaatcagtgcttcaggaatacgggctggcggctgagtatattgagcctgtcagcccgcatgtttggaaggtctactcaaactacggcatttttgctttgaaacagctcaagccggcccgcagcagtgaatttacggatcttatgattgagattgaggagaaaggctaccgatcatttgtgccgatctgccgcacgtatgccggcgatttttttgcgggaagacagacggagaattcttattatttaatgccttggcttcagtacgatcaggaagaggaacgggatcaaaaacatgtttacctttttaaagaggtcgcgaagctccattctgcgactgtgcgggacatccaaatccggactgaagatatcagcggcttttatgaagcaacgaaaagagattgggaaaatgataagcttgtctatgaacaattcgccgaacgggcggaaaaagagtggtatctttcaccttttgaactgcaggctgttacgtatcttacagaaacggtttctgccgtcaattttgctctggagcgtctggaagaatggtttgacgcggcaaaggatcatgacaagacgagagcggtgatcaatcacggcagcctatcgagccgccactttctgtataatgatgcgggatcgggctttttcacaaatttcgagaaagctgcgctgggccctccgcaaaacgacctgctcggcttttactccagaatgttcagaagctatccgaaagcatgcccggaatgtctggactggttttatacgtatcacaaatcattcccgctccgtgaagcggaaatcagcctgtttctcagctatatggcttatccgtccgccatgtacaaagtgctgaaacggtatcagaccggccaaaggggctctgaaaaagaagagtgcacgcaattattaagagcgttttggcagatgaaaaatgttgagccttttctcatgaaggttcatcagattgaacgggagaaaaaaataaaagcggaaaacgagtcctcttcataacgggactcgtttttttatatccattccaaatgcagggcgcacgctaaaaacagcaggatggcaagcagcaggacatcaaaagtcgtcggaaagaaaatcgtcctgatcccctgaaagatcgtaatcgggattatgacttgcgcggatacaaggcggacctgtctggcccactgggggagcgaataagaattgaatttttttctcacgggcaattcctcctcacattcgcctttctatgtatcgtatgtaagggaaagggcggggtgcatgcccatttatgtatgacagcagcggtttttggaaaagatgattgacgaatcaaaaacacttttactataataaagaacataataaataagatcatgagctgatataaatacacctgctttgaacgggaagagtacaagaaagacgcatgaagagagagaagctactgtgctgaaaggcttcttatgccgtctcattggaaggtcgcccgggagcataatttcttgaacatacagtagagaaattcgggccgcacccgttatccgtttaagtgcatgaacaaatctgttcatgaaaaaaggtggtaccgcgaaagagcttttcgtcctttatcaggatgaaggctcttttttagttgctcagccatttctaaacatgctggagggttatcatggatacaaatgaacaaacaatgccgacaaaatatgatccgtctgcgattgaaaaaggccgctatgatttttggctgaaaggaaaatattttgaagcgggcggcgatcaaacgaaacagccgtattctgtcgtcattccgccgccgaatgtgacgggcaggctgcacctcggacatgcgtgggatacgacgctgcaagatatcgttacgcgtatgaaacgcatgcagggctatgacgtgctctggcttccgggcatggatcacgccggcatcgccactcaggcaaaagtcgaagcgaaactccgtgaacagggcacaagccgttatgacctcggccgtgaaaagtttttagaagaaacatggaagtggaaagaagagtatgctgatttcatccgcagccaatgggccaagatgggactcggactcgattattcacgtgaacgtttcactcttgatgaagggctgaacaaagccgtgcgggaagtattcgtcaagttgtacgagaaaggcttgatttacagaggcgaatatatcatcaactgggaccctgccacaaaaacggctttatccgatattgaagtgatttacaaagacgtacagggcgcgttttatcatttgcgctacccgttagcagacggttcaggctcaattgaaatcgcgaccacccgtccggaaacgatgcttggcgacacggctgtcgcggttcatcctgaagatgagcgctacaagcacttaatcggcaaaacggttattctgccgattacaaaccgcgaaattccgatcgtcggcgatgattatgttgatatggaattcggatcaggcgccgttaaaatcacgcctgcccatgatccgaatgactttgaactcggaaaccgccacaatttagagcggattctcgtcatgaatgaagacggaacaatgaatgaaaaagcgctgcaatataacggcatggaccggtttgaatgccgcaaaaaactcgtcaaagatcttcaggaatccggcgttctctttaaaatcgaagaccatatgcattctgtcggccacagtgagagaagcggcgccgttgttgagccgtacctgtccacacaatggtttgtcaaaatgcagccgctggccgatgctgcggttgaccttcagtcaaaagaagagaaagttcacttcgttcctgaccggttcgagaaaacgtacctgcactggatggaaaatatccgtgattggtgtatttcccgtcagctgtggtggggccaccgcatcccggcttggtatcacaaagaaacaaaagaagtgtacgtcggccttgaggcgcctgaggacagtgaaaattgggaacaggattcagacgtgcttgatacatggttcagctccgcgctttggccgttttctacaatgggctggcctgatgaaaacgctgaagactttaagcggtattactcaaccgatgttcttgtaacgggatatgacatcattttcttctgggtatcccggatgattttccaaggccttgagtttaccggcgagcgtccgttcaaagacgtgctgattcacggcttaatccgtgacgagcagggcagaaaaatgagtaaatcccttgggaacggcgtggacccgatggatgtcatcgacaagtacggagcggattcactgcgctacttcctggcaaccggaagttcaccgggacaggatctccgtttcagctatgaaaaagtggaatccacgtggaatttcgcaaataaaatttggaacgcctcccgttttgcattaatgaacatggacggcatgacgtatgacgagcttgatctgtccggtgaaaaatcagttgctgataagtggatcctcacaagactgaatgaaacgatagaagacgtaacacagcttgcggatcgttatgaattcggtgaagtcggacgccacctgtacaactttatctgggacgatgtgtgcgactggtatatcgaaatggcgaagcttccgctgtacggggaagatgaagcggcgaagaaaacaacccgttctgttctggcatacgtgcttgaccagacgatgcgtcttcttcacccgtttatgccattcttaacggaagaaatctggcagcaccttcctcatgaaggcgagtcaatcacgatcagctcttggccggttccggtgccggagcatacggataaagaggcagcggcggatatgaaactgctcgttgaattaatccgttctgtccgcaatatccggagcgaagtcaacacgccgatgagcaagcaggttgagctttacattaaaacagctaccgaagacattgccggccgcctggaaaagaaccgttcttacgttgaacgctttacgaatccgagcacgctgaaaatcgggacggatatcactgcggcagacaaagcgatgacagcggtcgtcaccggagcggaagtcattctgccgcttgaagggctgattaacattgatgaggagatcgcccgtctgcaaaaagaattcgacaagctgacaaaagaggtcgaacgcgttcagaaaaaactcggcaacgaaggattcattaaaaaagctcctgaacatgtcattgaagaagaacgcggaaaagagaaagactacacggcaaaacgcgaagctgtccggcagcggattgcagagctgaaaggctgataaaacagcggggcggtttcctaagaaaccgccttgtcgtataaaagaggggatttcattgtttaatacgtacaaagaagcgatcagctggattcacggcagactcaagttcggcgttaagccgggccttctccgtatggaaaagctgatggaaaaactggaacacccggaaaagaacattcgcgctattcatgtggcgggcacaaatggcaaagggtcgaccgtcgcttttatccgttccgtgcttcaagaagccggttatacggtcggcacgttcacatcgccttacgttattacgtttaatgagcgtatcagcgtcaacggtacgccgattaccgatgaggaatggagaacactcgttaatgacataaaaccgatagtcgatgagcttgataagaccgatgccggaacggtgacagaatttgaaatcattacagcgtgtgcatttttatattttgcgaagcgggctgatatcgattttgtcatttttgaagcagggctcggcggcacatttgattcaaccaatattgtgaaaccgctcctgtcggtcattacaagtatcggacatgaccatatggcgattttaggcaataccatcgaggagatcgccgggcagaaagccggtatcattaaaaattccattccggtcattacgggcgtcaatcagccggaagcactcggcgttattgaagcggaagccgaaaaaaagcaggctccgtatcagtcactatataaaacgtgcagactgtttaatgaagcggcgcttccgtccggtgaaagcttttcgctggaaacggaaacgaaatgctatgaaaacattcaaacgtcgctgatcggcattcaccaaaggcagaatgcggcattggcgatattggccgctgaatggatgaatcgtctggaagccgcagccatttctgaagaagcaatgcgaaacggcctgaaaaaagcatcgtggccgggccggtttgaacgtcttcaaagccgccctttagtgtttgcggacggcgcacataacgaagaaggcgttgacacactgacagaaacgatcaggcagcgctttgctggtaaaaacgtccatgtcgtattcagcgcattaaaagacaaaccgtatcaggaaatgattaaaaagcttgaaaacgaagcggactctattcactttgtatcatttgactttccgcgtgcttcaagcgccgaagccctttataacgcaagcagtctagcggataagagcttcgatgagaacccggacagtgtgaaagaatggatagatcaaaaagacggggcggatgatgtcatcatcattaccggttccttatattttatttcagaaatgagaaagcggcttatctgacagcccctcggatgcccggcagaccctttttaggttttgccgggtgtttttatgctgaaaatatattttcagccatttcagtcatggtgtttttctttgctataatctgagccagattgatagtaaaggtgtggtctgagtgcttttgattctgttttttctcggtttgattttcggttcttttttttatacagcagcgtgccgtatcccgcttcgaatctcggttatttcgccgcgttcagcctgttcgttttgccgcttgccgctctcctggggggagcttgtgcccgtcgtttcctatattctgcaaagaggcagatgcagaaactgccgtggaaagctgtcggttatgtatccggcggcggaatgctggacggcgtgtttattcacggctgcaggcattcatttcggtttctcaaaagaactgttagtcgcgctgttatttctgtctctgctcatgattgttactatgacggatctgcaatatatgctgattcctgacaaagttctgctgttttttcttccgcttttcatcgccggccgtatgttttctccgctggattcatggtatgcagggtttgccggagccgtttgcggattttttctgcttgtttttatcatgtttgtcagtaaaggaggcatcggcgcaggtgatgtgaaactgtttggggtgatcggcctgacgctcggcgtgaagctcgtgctcattgcattctttctttccgttatgatcggagccgtatacggcatgtgcgccgcagcccggggcaggcttggtaaaaagcagccatttccgtttgcgccggccatctcagccgggagcgctttgagttatttatacggtgaagagctgttttcgttttacatcaagctcgcttcaggcggagcttaaaaaatttggcgaacgttttttggacaagacgacaaaagtcttgttctttttttttacgcctatgctaaagtgtgaaccatgatcagttcaaggtacggccaagacgaatgcaagggggaagagacgttgaaaaaaaggaagagcaaaaagcacagcaaagccaaaaacaatgcccttaaagtaaccattaacggacaagaagaaacgatgtatggacaagaagatgtgaaagaaggcggggagaagaccgtcacattttcaaattgggaagaaacaaaaaaggcggagcaggagaccgccgcatcccatgaagatccgaaagaagaagatttcaattgggaacatgagaagaattctgaggtatttgaagatgacccgaaagtcgttccgtcataccagaagaaaaaaaccggccctcattttccgaaaaaaaagcagccgtcttctccagttaaaaaagcggtcacgacaattgccgttgcggctgttttaggcaccgggctcggccttgtcgccttaaacatgtcgggaagtaaagaagcctccgctccggcgtcagctgacaaaggttcacaagggcagacggtaaaagcgggagatgtttctaaagacaaatctgaaacagccggcacaggagatgcggaagcttccgatggaaattataaaacatatgcggtgcaggccggaaaattttcatcagaaaaaggagcgcaaacgcttgttgaccagctgactgaaaaaggatactcggccgtttctttggcaaaagaagacggatacacatacgtgatcgccgggcttgcagcggaaaaaaccttatcacagcaattgggtcagacactgatagaccatgattttgaggcttggggcggaaaagagctcagctttgctgtcgattcaggactggaagactcttttaaacaagcatccgagctctccgccaaagcgattaccggcaaagatctttcaaaaacggaagtggctgaagcggcaaaagcggcagacggtgcagacgccgctgacaaaaagcagaaagaggccgtgcttcaagcgctgaaagaactggaaacgtcgggttcggaatccggctggaaagcccaaaaagagcttttaagtgttgtaaaatagtatctcatttcccgtcatccggcgggattttttattttgtcatcaaaaagttatttttctgaaattgtggttgcccgtttgatttggtaggatagacaagtatctttttttcttaagcaaaccctgaaaggatgacaatcatgacaaaacgcttaatactcgcatcacaatctccgcgaagaaaagaactccttaatcttcttcagattccttacagcattattgcaagccgcacggaagaaaaattaaatcgaaacctttcgccggaagaaaacgtccaatgtttggccgagcaaaaagccggtgctgtattggccgaaaatcccgatgcagtcgttatcggggctgacacgatggtgtgcatagacggcgaatgcctcggcaaaccgcatgacagagaagaagcggcacacatgctgcggaggctttccggccgaagccatcaagtcattacggcggtcagcattcagacgcatgaccggaaagaaacgttctgtgacacgacggaagtgacgttttggccgctcagtgaagacgacatacagctctacattgaaacaaaagaaccgatggataaagcaggtgcatacggcatccaaggaaaaggcgcgcttttagtgaaaaaaatagacggtgatttttattctgtcgtcgggcttcctgtcgctaaaacaatgagagccttgaaagaatttaatataaaagcttgatgttcaaaccgggaaggggaacaaggaggggttgatcatccgtgatctgccgttaaaattaagagatttccccgaaaaagaaaaaccgagagagcggcttctgcacttcggagccgaacatctctctaacaatgaattgctcgccatcctgctgcggacgggaacgaaacatgagtccgtcatgaacctcgctcaccggctgctgcggacgtttgacgggctgcgactgttaaaaggcgcctctgcccaggagctttccagcattcccggaatcggcacggtgaaagccgttcagattcttgccgcaattgagctggggagccgcattcataagacatccgccggggagcattgcgtcatccgctctccggaagacggggcgaagtatgtgatggaggatatgcgctttttatcccaggagcattttgtctgtttatatttaaataccaaaaatcaagtcattcataaacgcaccgtttttatcggaagtctgaattcatctattgtccacccgcgggaggtgtttaaagaagctttcaaacgatccgccgcgtccttcatttgtgttcacaatcatccttcaggagatcctacaccgagcagggaagatatagaggtaaccaggcggctttttgagtgcggaaatttaatcggcatcgagctgctggatcatttggtcattggtgacaaaaaatttgtgagtttaaaggaaaaaggatatttgtaacactttttttttcgttgatttaagatataatagattttatgagtttttccctttagggtatttttgctttaagaaaggaagatacatacatatgttcggaattggtacaagagaccttggtatagatttgggaaccgcgaatacgcttgtgtttgttaaaggaaaaggaatcgtagtgagagagccgtctgtcgttgctctgcaaacggatacgaagtccatcgttgcggtcggtaacgatgcgaaaaacatgatcggaagaactccgggcaacgtggtcgcgctccgtccgatgaaagacggcgttatcgctgactatgaaacaactgcgacaatgatgaaatactacattaatcaggctgtgaaaaataaaggattgtttgcgagaaagccttacgttatggtgtgtgtgccgtcaggtattacggccgttgaagaacgggcggtcatcgacgcgacaagacaagcgggcgcacgtgacgcttatccgattgaagaaccgtttgcggcagcaatcggcgcgaatcttccggtatgggagccgacgggcagcatggtcgttgatatcggcggcggaacaactgaagtggcgatcatttctttaggcggcattgttacgtctcagtcaatccgcgtagccggtgacgaaatggacgactcaatcatcagctatatcagaaaaacatataatttgatgatcggtgaccgtacggcggaagctattaaaatggaaatcggttcagcagaaaccggtgaagaaaatgcgtcaatggaaatccgcggccgcgatcttctgacaggtctgccgaaaacgatcgaaatcacgggaacggaaattgcaaatgcactgcgtgatacagttctctcaatcgttgacgcggtgaagagcacgcttgaaaaaacaccgcctgagctggccgctgatattatggacagaggtattgtattaacagggggaggcgccctgctccgcaatctcgacaaagtcatcagcgacgaaacgaaaatgcctgttcttatcgctgaagatccgctggattgtgttgcgatcggcactggaaaagcactggagcacatccatcttttcaaaggaaaaacaagataatcaggagttaaatagaagaggtgtatcacgatgccgaacaaacggttaatgctattacttctgtgtattatcatattggtggctatgattggattctcgctgaagaacggccgtaataccacctggcctgaaaagctgatcggtgatacgacgggagtatttcaaaacatttttcacacgcctgccgaatattttgcagggttcttcggggacataaaagacctgaaaaacacgtacaaggaaaacgaacgcttaagacaaaagctggacggacagacacaatatgaagcgaagctccaagaactcaaagatgaaaacaagaagctgcgtgatgaactcggacatgtcaaatcaatttccgactatgatccgattttagcgaccgttatcgccagaaaccctgatcaatggtacaagcagatcatgatcaataagggaacgaagcagaaagtggccaaagacatggctgtcacgaacgaaaagggtgcgctggtcgggaagatcaaaagcagcggactcaacagtttcacatccgccgttcagctgctgagcgatgttgaccgcaataacagagtagccaccaaaatctccggcaaaaagggaagcaaaggctacggtttaattgaagggtatgataaaaagaaacagactctgaaaatgaccatccttgagccggatgaaaaacgcgaagtgaaaaaaggcgacctcgtggagacatccggaacgggcggcgtatttcctcaagggctgacggtcggggaagtgaccgatgtagaatcagatgcttacggcctgacgaaaatcgcttacgtgaaaccggctgccgacctgtacgatcttgaccatgtcatcgtcgtgaaccgaagcgtagcaacaggggaggaaggatcgtgaaacgtttccttctccctttgattatgattttggtcttttgtgcggaaagcatctataccgatctggtgcgttttcctttcgtttccgtcgagcagcaggtcgttccgcattttcttttgcttgcgctgatttttatgtccgcttatatcaaccaaaagcatgcggtgatctacggtttgattttcggatttctttatgacattaattatacgggtgttttaggcgtttatatgtttggttttgccggtttatgctatctggcggccaaagcgtttaaagtgcttcagacaaacgccctgatggtcattttggtcgcggtgctgagcgtatgcgtgcttgaattttacgtttacggcattcagacgttaatccgcagcggcacaatgacgtttaacgattttgtcattcagcggttcttgcccaccgctttgctgaatattgcgggagccgttatattagtcctgcccttcaggctgttttatataagtctgaagaaagaattaagagatgagtaaaaaggattttatctttttttgacgaaaagagtatgttgttgaggtgaacattgatgaagaccaaaaagcagcaatatgtaacaataaaaggaacaaaaaacggcttaacattgcatctggatgatgcgtgttcttttgatgagcttctcgatggtcttcaaaacatgctgtcgattgaacaatatactgatggcaaaggccaaaaaatcagtgttcatattaaactcgggcatcggtatctgtatcaggaacaggcagagcagctgactgatctgatcgcgtcaaagaaagatttagtcgtgcattcaattgacagtgaagtcatcgccaaaaaagaagcgcagcggatgaaagaggagcaggaaattgtttctgtttgcaaaatcgtccgttcgggccaggtgcttcacgtgacgggagatttgcttttaatcggagatgtgaatcccggcggtacgatcagagccggaggaaatatatttgttctcggttcattaaaagggattgcccacgcgggttataacggaaataaccgggctgtgatcgccgcatccgaaatgatgccgacacaattgaggatcaatcacgtgttaaatcgctccccagaccacattcaaaaagggaacgacatggaatgtgcttatttagatactgacggaaatatggtcattgaacgccttcagcaattggctcatttaagacctgatctaacaaggcttgagggaggaatgtgaaattgggtgaggctatcgtaataacttcgggaaaaggcggagtaggtaaaacaacaacatctgcaaacctcggtaccgccttagccattttagggaagcgcgtctgtttggtagacacagatatcggactgcgcaaccttgatgtcgtaatgggtcttgaaaacagaattatttacgacttagtagatgtaattgaaggcagatgcaagacgcatcaggcgcttgtcaaagacaaacgttttgatgatctgcttcatttaatgccggctgcccagacaagcgacaagacggctgttgtccctgagcagatcaaatcgcttgtgcaggagcttaagcaggaatttgattatgtcattattgattgtccggccggaattgaacaaggctataaaaatgccgtctccggagctgataaggcgattgttgtgacgacgccggaaatatcagcggtgcgggacgctgaccgcattatcggacttttggagcaggaagatattgaaccgccgcgccttatcgtgaatcgcatcagaaatcacctgatgaaaaacggtgacacgatggatgtggatgaagttgttcatcatctgtctattgatctcctcggaatcgttgctgacgatgatgaagtgatcagggcttcaaatatcggcgaaccgattgccatgaattccaaaaaccgcgccagcattgcgtaccgcaatatcgcccggcgcattttaggagaatccgttcctttgcaggtgcttgaagagcagcaaaaagggatgatggcgaaaatcaagtcatttttcggcgtgcgttcataatatataccagaatacaaagatctgatgaagcccagcttatcaggtcttttttgtttttcaagagcgcatatttgcaatggacaagacataggatgtacaaacccaacgattgcaaaggatgatggcgatgagtcacagagctgatgaaattagaaaaagactggccaaaagaagaaaacagcggcctgaatcaaaacggactttcgttcaaaacgcccaaacgcagaattttcccgcgtggcagacggtcaaggagcaggaaaagcacaagcttctaccggactacgaatatcaaacggaacacccgcccgaatttaacggacggcatccattgatcagcgctcattctattattttaaaatgcctgctggctgcctgtctcgtactgatctccgctattgcctataaaactgacaaacagccgctgagtcagatcaaaccggcgatcgcacaaacctttcaaaaagaatttcagtttgctgccgtaagcaattggttcgtatcttccttcggaaacccgctcgcttttcttacgccgggaacgaaaaagaaggacggtcaggtggcggtcagtcaggatatggccgttcctgccgcggggaaaatccagcaggactttcaaaataacggagaaggcgtcgtcgtcgaaactgccagtgaagccattgacagcgtaaaagaaggctacattatggaagtgagcaaagataaaaaaacaggcctgacggtgaaggtgcagcatgccgacaatacaagcagcatttacggccggctaaaagatgttaacgtttcattgtacgactttgtcgataaagggaaaaagatcggttcgatcaagctcaacgataaaagtaaaggccagtactatttcgcgatccaggatggcgataaattcatagatccgatccaggtgatcacttttgatgaataaatggctcagcctccttttcaaagttcatgtccatccttttctttggattatcatggggcttggtcttatgacggggcacatcaaagcgctgctgtgtcttttgctggtcgtatccgttcatgagctggggcatgctgctctggctgagtttttttcgtggcgcattaaacgaatctttctgctccctttcggcgggacggttgaggtggaggagcacggaaaccggccgcttaaagaggaattcgcggtcatcctggcgggcccgcttcagcatgtgtggcttcaggcggcagcctggctctttttcatgtcaggttttgcaagtgagcagacatttgagatgtttaccttttataatctctccattcttttcatcaatcttttgccgatctggccgcttgacggcggaaagtttgtgtttttatacttctccaaacaaatggcttttcaaaaagcgcatctcctcagcctgcagacatcggctgtttccgcgcttttactctgctgctggattgtgctggccgtcccccttcaggtcagcgcatgggtgctgttcgtctttctcaccgcttctttatgggatgaataccggaagcggcactatattcagctgaggtttcttttggagagatactacggcaaaaaccgcgatgtcgccatgctgcatcctttgacggtcgcggccgatgccaaagtaaagcatgtcatggccgaattcaaacggggatgcaagcaccccattatcattgaaaaagccggagaaaagctcagccagctcgatgaaaatgaagtgcttcatgcgtattttgccgataaacggacagattcctctatggaagacctgctgctgccttactagaaatagattgacatatccttttggttctgatatattttttaatgttatggatgtagcaccaatgctacaaccgctcgggacaggtgataagagctttaaagccccctgttgctggcgagtcttagtctaataggaggtgcagagaatgtacgcaatcattaaaacaggcggaaaacaaatcaaagttgaagaaggtcaaactgtttacatcgaaaaacttgctgctgaagcaggtgaaacagtgacgtttgaagacgtattgtttgttggcggagacagcgtgaaagtcggcaacccaacagttgcaggcgcgacagttacagctaaagttgaaaaacaaggccgtgcgaaaaaaatcactgttttccgttacaagccaaagaaaaatgttcataaaaaacaaggtcatcgtcagccttatactaaattgacaatcgaaaaaatcaacgcgtaagcatgattgaggcaacaattcgaagatcccggaatgacgggggcattttgtcctttgaaatgacgggacatgccgattttgctgaacatggacgagatctcgtatgcgccggggtcacggctgtcgttttcggagcggtcaatgcggttatcgcgctggctcctctcgaaccgattcttgatataggcgaggacgggggttatttctactttgaattccctgaagccgctgatcaggaagctttgcaaaaagcgcagctgctgattgaaggcatgattgtttctcttgaaacgatcgagcgggattacagtgaacacttacggttgactgcaaaccaaatataggaggtgagttacatgcttagattagatcttcagtttttcgcttctaaaaaaggtgtaggttctacaaagaacggacgtgactctgaatctaaacgtttaggcgctaaacgtgcagacggtcaattcgtaacaggcggatctatcctttaccgtcaacgcggaacgaaaatctacccaggtgaaaacgtgggccgcggaggagatgacactctttttgctaaaatcgacggaactgttaaattcgaacgtttcggccgtgaccgcaaaaaagtgagcgtatatcctgtagctcaataatgacacaaaaaactccggtcgttgactggagttttttttgcagtaagcggagtaacatcaagaatgaaaagcagaggatgcgtgagtgaaccccgccttgaatgaggacatcagcttcccatacccactggatatgttccccaagcagtgataccaaaaatgtttctgcctggcatccgcattgtatgcgatccgaaaaaggaacatgatgaaccaggaaaaacaagtgtttttttaacaaagccttctctgttataattcatagtacacacttatcaagactcctaaaaagaaattaaacgattgggagtgcgaaaatgaaggatgtatcgaagaaacaagaagaacctgtaagcgatgcggctttgatcaatgagctgatccaattaatgggccatttccgtcatgattggatgaataagctgcagctgataaaaggaaacttaagtttgcagaagtatgacagggtcgttgaaattattgacgaaatggtcatagatgcaaagcacgaatcaaagctctcaaacctgaaagccccgcacttggcgtttgactttcttacatttaattggaagtcccgttatatgagactcgaatacgaagtgctcggagaaattaaagatttatcggcatatgatcaaaagctgtcgaacctgatgagaaagctgtttcatctgttcggtctggcagtaagcaatgaaagtgaaaatcatctgaccgtatcgctgcagacggatcaccctgacagacagcttattgtatatctcgattttcatggaacgattgcaaatgcagatgtgtttgatgaatttcgcaaatcccggtatgaggactttgatgtcatgcaatttgagctgaccggccatgaatgtgtggccgaaattggaatgaactagcggttttttacggtttagaacggaggatattatgtttgtagatcaggtgaaagtatatgtaaaaggcggcgacggcggtaacggaatggttgcgttccgccgtgaaaaatatgtgccgaaaggcgggcctgccggcggtgacggaggtaatggaggcgacgtcgtttttgaggttgatgaaggactgcgcacgctcatggacttccggtaccagcggcatttcaaagcgatacgcggcgagcacggcatgtctaaaaaccagcacggcagaaatgcggacgatatggttgttaaagttccgcccggcacagtcgtaacggatgacgatacaaaacaggtcattgccgatctgactgagcacgggcagcgcgccgtcatcgcaaaaggcggacgcggcggacgcggaaatacccgctttgcgacaccggccaacccggcaccgcagctgtcagagcacggagaacccggaaaagagcgctatatcgtgcttgaactgaaagtgcttgcagacgtaggtctcgtcggcttcccgagcgtcggaaaatctacgcttctgtctgtcgtttcatcggcaaagccgaaaatcgccgattatcattttacaacgcttgttccgaatctgggcatggtggaaacggatgacggaagaagcttcgtcatggcggatctgcccggtttgattgaaggagcgcatgaaggagtcggcttaggccaccaatttctccgccatatcgaacggacgcgcgtcatcgttcacgtcattgacatgtcagcgatggaaggccgtgatccgtatgaggattatgtgaccattaatcaggagctcagtgaatataatctgcggctgacggagcgtccgcaaattatcgttgcgaataaaatggacatgcccgaagcggctgaaaatcttaaagcgtttaaagaaaagcttcaggatgaccatcctgtcttcccgatcagcgcggtgacgagagaagggctccgcgatcttctgtttgaagtcgccaaccagctggaaacaacgcctgaattcccgctgtatgatgaagaagaactggcggaaaaccgcgtaatgtacacgatggaagacgaagaaattccatttaacattacccgtgatccggacggtgcgtttgtgctttcaggtgacagtctggaacgcctctttaaaatgactgacttctcccgtgacgaatccgtcaagcgttttgcaagacagatgcgcggtatgggcgttgatgaagcgctcagagaacgcggtgctaaagacggcgatatcatccggcttctggaatttgaatttgaatttattgattaaaaaaatggagagcttgcattgcaggctctctgatgtaaaagggaggggtgcaggtgaaagaagagacattttatttagtgcgtgaagacgttctgcctgatgcgatgcggaaaacccttgaagtcaaaaagctgctggacagaaaaaaggctgaatcggttgcagatgccgtgcagaaagttgatttaagcagaagcgctttttacaaataccgagatgcggttttccctttttacacgatggttaaagaacaaataatcacacttttctttcatttggaggatcggtcaggcgcgttatcccagcttttgcaggcggtggctgactcaggaagcaacgtgctttccattcaccagacgattccgcttcagggcagggcgaatgtcacgctctcaatcagtacgtccgcaatggaagaaaacattcatacgttaatgaataaactgagaaaatttgattttatagaaaaagttgagatcttagggtcaggcgcgtaaggagagaagagacatgaaagtcggttatttagggccagaagccacatttacacatctagcagtcagttcctgctttcaaaacagcgtgacacaagcaccttatcaaacaataccggcatgcatggatgcggcggttgcgggagaagttgatcttgcatttgttcctttggaaaacgcgctggagggctcggttaacttaacgattgactatttgattcatgagcagcctcttgcgatcgtgggggaaatgacgctgccgattcaccagcatctgctcgttcacccttcgagagaaaatgagtggaaaaagcttgagaaaatttattctcattcccatgcgattgcgcaatgccacaaatttcttcaccggcatttttcgtccgttccttatgagtatgcgaagtcaacaggtgcggctgccaagtatgtcagtgagcattcggaccttccgatcggcgtgattgcaaatgaaatggccgccgctacatacggattgagcatcgtgaagcgggatattcaggattatcaggacaaccacacgagatttgtcattctttcgcctgaaaaagacgtctcattcgaagtgaatgcgaaactgtcttcacggccgaaaacgacgatgatggtaacgcttccccaagatgaccaatcaggtgcgctgcacagggtgctgtccgctttttcatggagaaacctgaatttatcaaagatcgaatcgcgcccgacaaaaacgggtctcggcaactatttctttataattgatattgaacaggcgatggatcaggttctcattcccggtgccgttcaagagatggaagccctcggctgccgggtcaagcttctgggaacatatcaatcctattcgatataaaaaaagcccttcagggggcttttttttaatcttttattaaaatacccgcgtcgtccagcgcttggcaggcttggtcaatccgctcttttgtcggggcgcttaacgtatggaggtgcacgccttcggtcagctgtgaaaggtaagcggcatttgtcgaattaatgtgatccatgaattgtttgacttctttccgtgtgctgactcttatggcggcggttaaatcgccatatacggggtgttcaataatgacgtcctttatggtgacgccttcatcgacaatgagttcaagctcttcttccgtccgctccggaccgtgcagacaggcgacaatccgttcggcgttatttccgccgccggcattcatgctgatgtataagtagccttggctcgtcgcgataatcggctcgttttttgctttcaagagcgatatgtcctgcacgatcacctgtcttgagacatttgcttttttggccaattcgcctcctgttaatggcgagccggcttctttcagccaatgaagcagcatgtcgcgtcttttcgcccctgtaagcttcgttccttctgtcaaattgctgattctcctttcttttgctcccacagcgccgtaaatgtatgtatcagcatatcgagctgttcacatgttgtttcgtttccgaatgagatccggaaaaactgccgcgcttcccgttcggtttttctcagcgccttcatagctgaagaagggccgtggctgccggcggaacatgcgctcccggttgagatgcaaatatcgttacgattacattctaacataatatattgtccttcaaaggagtgaaaaaaacacccgacaatgtggggcaggcattcaccgccggtttcttcctctgaaaatgaaatggggaggccttgacgccgaatttggtcatacaaataattcctcagcctgtcagcatgctcacggtgttcctccatatgtttcactgcatactccgcagcagcggtaaaagcgccgatggccggcacattcaccgtaccgggcctgaacccgttttcatgcacggtatgcggataaaccggattccagctgacaccgggccgaatgtaaacagccccggtgcctttcgggccgtatactttatgaccggagacggaaagggcgtcgattcccgcctgatccgcatcaatcggcagtttgccgaaactttgaacacaatcgcaatgcagcaaaatgtttctctggtgaagaaaagcggccagacgattcacaggctgaatgaggccggtttctgaattggcgtgctgtatggaaacgagccccgtgtcaggacggatatgagccgccagtatgtcttcggttataaggccgttttcgtcgggatatatgatggtgacatcaattccccggtcagctaagaacgccgcggcattatggatcgaatggtgttccattgcggtcgtaataaaatgttttttgtggtcgggcagaccgtgcagcaatgattggacggccaagatgttcgcttccgttccgccgcttgtaaagtaaatgccgtctgccgctccgccgatcaaatttcctgcagaatgtctgcaatattccagcacgtccgccgctcttcctccggcgtcatgaaggctgcttgcattgccgtatacctctgtgctgagatgctgaaagactttcgcggcttctttgcttaaaggcgctcccgccgcgtaatcaagataaatcatacagcccgtctcctatccgtttatgttaaaaaaaagcttgagtttattttatcgttgtgtaaatataggtgtcaagacaggtgtaaataacaggagggtgatgtatgtctgaaaaaacaattatcgtcattggttcggggacggcggcccttgcctgtgcttcctcatttcctccgtcataccaagtgaccgtcatcacaaagagaagcgtaacgaacagcaattcgcattatgctcaaggcgggattgctgtttcatacgcaaaagatgactctatagaatcccatgtgaacgatacactgtatgcgggatgcggacacaatgacgtgacagccgtgcggcatttgctgaaaagcggacagagcatgataaacaggctgatagaaggccatttcccttttgatacaaagtcggacggaacgttttgtctcggcagggaaggcgctcattcgaaaaggaggattctgcacgccgggggagatgcgaccggacggatgttggttgagtttctggttcagcagctgagggacggcatacggatcattgaacacgagacggttgttgatcttctgattgaacacggacgatgcgcaggcgttgccgtaatggatgcttcaggcgctgtttcttacagaagagcggattgtgtagtgcttgcatcaggcggctgcggcagtttgtaccaatatcacacaaatgattccgccataacgggagacggcatcgctcttgccttccgcgctggagctgagatcacggatatggagttcacccagttccacccgaccctccttgtgaaaaacgggactgtgtacggcctgatttctgaagcagtgagaggagaaggcggatatttagcggatcgcttcgggcgcaggatcatggctggcagacacgcgctagaagatttggcgccccgggatgtggtttcacgggcgatttatgaagaaatgatgaaagaaaatcctgtttttataaattgcagcagaatagccgattttaagaaacgttttccgaccataacaggtatttgtcaaacagccggtgttgatcttgaaagcgggattcctgtagcacccggaatgcattttttaatgggcggagtaaaagccgatacctgggggaaaacgtccgtgcctgatttgtacgccataggcgagaccgcctgcacaggcttgcacggggcgaaccgccttgcgagcaactcactgctggaagcgctggcaagcgggcaacgatgtgctgaacatatcactcaaacgccgttaaacggaagatataaaaaaaccccgaagaaatctgacgtcatcttagaagtgccggacacatcgcttcatgtgctccaagccaaaatgacaaccggagcgggcatcgtcagggataaagaaaacatgcaggcgctggcatcctggcttaacaacgtatctgtgcgtcatataaatgtgaaggatatcacaatagaacaagccgagctatcctgcctatggaagactgcgcaacttgttgtgacctcagcccttattcgggaagaaagcaggggcgctcattttcgcgctgattttcccgggacggagaaagagtggcacggaaaacaaatcattcattcaacatctggaacagttatcagaaaaaacgaaaggattggggaactatggacattctgcagctgaaacaaatgctgacttatttttttcaggaagatatcggaacgggtgatgcgacgtcacaagcgattttttctgatcagcaatgtaaagcgcgaatcatcgcaaaaacagacggcgtgtttgccggagaagccgttatccgtgaaggatggaagcttttacacgatgacatccgtatccgctccctgaaaaaagacggagaacggatgaaaaaaggagacgtgctcgctgaaatggaaggccagacggcggctcttcttacgggggagcgggtcattctgaatctcatacaaagaatgtcaggcattgcgacaatgacggatgaggccaaaaggcgtcttgatgatccgtccattaagatttgtgatacgagaaaaacgacacccgggctcagaatgctggaaaaatacgccgttcgggtcggaggcggctttaatcatcgcttcggcttatatgacggcatcatgataaaagataatcatattgccgcctgcggatcgataaaggcggccgtggagcgggcaagaaaaacggcggggcagatgcttgcggtggaagtcgaaatcgaatccgaacagcagctgcttgaggcaatagaagcgggcgcagacgttattatgtttgacaactgtccgcctgagtccgtccggcgttttgcagacatgacacctggccatatcaaaacggaagcatccggaggcataacgctcgacacattgcccgcttataaaggaacgggcgtccaatatatttcactcggatttctgactcattcagtaaaaagcgccgacatcagcatggatgttgaggctgcggaacagggggatttttaagatgtctatttttgacgtgctaactgcatcagccgaaatgatgccgagctcttataaagaaatgagcaccggagaaatggaaaagcgggtcgccgccattaaacgggctttcggaaagcgtctgttcattccggggcatcattatcaaaaagacgaagtaatacaattcgccgatacggcaggtgactccctgcagcttgctcaagtggcagaaaaaaataaagaggcggaatatattgtgttttgcggcgtgcattttatggcggaaaccgctgatatgctgactgatgataaccaaaccgtcattttgcccgacatgcgcgccggatgctcgatggctgatatggcagatattcagcagacggacaaagcatggcaagagcttcaagaactgtacggtaacaccatcattccattaacatatgttaactcgacggcggaaattaaagcatttgtcggacggcacgggggagcgaccgtcacctcttcgaatgcccggagtgtgctgaaatgggcttttaaacaaaaagagagaattttatttttgccggatcagcatttaggcagaaatacggcctatgatctcggcattcccctgacagaaatggctgtatgggacccggtccagaaccgattgcttactgaccatccggaaaacattaaggttatcctttggaaagggcattgctccgtacacgaaaagtttacagcggaaaatatttctcagctgcggcagcgggattccggcatccgcattatcgttcatccggaatgttcgcgggaagtggtctcgctcagtgacgacagcgggtctaccaaatacattattgatacgatcgaacaggctgaaccgggaagcaaatgggcgatcggcacggaaatgaatcttgttcagcgcctcattcaatcgcatccggataaacagattgaatcattgaatcccgatatgtgtccgtgtctgacaatgaacagaatcgacctgccgcatttattgtggtcgcttgagcagcttgaaaaaggcgagccgaagggtgtcattaaagttcctgaagcggttcggacagaagcgcttcgtgctttgaacagaatgctgagtcatacgtaattataaaaaattcccctccttcccaaaattttttatcatcatgcccagtccaccggcatatagtgtgaagaaacgtattgtaatgacaaatgtaccgttcacgttttgtgcataggaggggaaaacgttgaaaattcatatcgttcaaaaaggcgattcgctctggaaaatagctgaaaaatacggagttgatcttgaagagctaaaaaaactgaatcatcagcttagcaatccagacttaattatgcctggaatgaagataaaggtgccttcagaagccgttccggtcagaaaagaacctaaggccggcttcggaacgtctgcgcataagcatgagcatccatatgccaaagaaaaaccgaaatcagttgtggacattgaagacaccataccggaagaaccaaagccgtcaattccgtatgtgccgccaatccctgaaaagcatgaaaatgtgctgccggaagctgatatgaaccaatattacccgtccaatcagctgtttcagccgtggtcgcctcctaagccggaggaaccggtgacacattttgtcgagccgaaagaaaaagagcatgacaataacattccacaacaggaggaaatgatcaacatggaaaacgcgaattacccgaatatgccaaaggcgcctgaagccggaaagatggaagaagaaaacgccgcttatcatctgccgaacatgccaaacattccgaatgtcccgtttccgaatatgccggccgttgaaccgccttttatgcattacccgatgccgtgcatgccttgtccttgtccggttccggtgacaccgatgctgccgggttcgggactatgccacccttgcttcccggtaggcggaggtttcggcggttttggaggaggtttcggaggctttccggtaatgccgatgccgttaccgtacggattccatcatccgggatttgggccgcaagcgggttacggtgaatatgaaaaccaggcccatgaaaatgcagagcattatgatggttctgcatctggtttcggcggtgctccttacggtcaaatgccgtattacggcggatattcgtcacattacgcaaacgtgcctcatcatgatggaaaatataaggatgatgattgcggctgccatgattcacatcaccaccaccatcatcaccacggttcacatcatcatggttcacatcatcatcacgcaaatatgcctgtgcagccgtatccgaatatgggtgcaaacgcaggacattttatgccttacggcggagcaaatcccaatgtcgcgccgaatcagccgagtccaaatcaagtattcggacggccggaggaagaagaagattaatgtttcgggacgatgtatgtcgttcctttttttatgtccaactgaggaatggacataactgacaagcttaaacccgccgcccgccgcacatcctaaacatgagcggaaaacgctcaaacagcgatgaatccacggggggtttttccattgggtaaaaaactgatgacgatcgcgggcgttttagccgtgacggcaagcttaacggcatgcggagcaaataatgccatgaatgacggacgctacaatcagtcaacacgtccggtcggatattattcgaatgataatggtaacggcagaggccagtacggaatggaccatcaaggacccgtttctgaaatgatggaaaaccgaaacggccgtcataatacgacaaacgtgtccgaccagtacgcgcctaatgacggggttccgttaacgacggacggcacatataacggccgaaatgtcaatacgccgccggcagcaatgtcttataatgggtatgacaacgccgaaaacatcaggttggcagcaaaagttgcaaaccgcgtgaaaaaagtaaaaggcgtacaggatagtcaggtcatcgtgactgacacgagagtcgtcattgccgtcagaacaaatcatccttttacgaaaaatgatgataaacatgtcaaacatgcggccaaaaaattcgcggacggccgtacaattcaagtgtttaccgacaacgctacttttacaaagctgcaagacatgaacagaaacagccgttaaacggactgccggatgatttcatccggcagtatttttatggataaagcttcatcatttctttacatattcttaaaacgctctttatattgcggtgttaacataaaagtaataaaacgtaacggaggggccgggatgaaaaaaacggagcatgacaaaagccgcggagcaaaaactgtgtatctgaccgtaaggggataccggctcaaactgacgcccggacaaatgaaactgatttcagccggccgggcataatcatcggggcagccctcatatagaggctgctttttttcggctgaaacagacaaatgaaagaaaacgattaagcaccggcatctttggtcaaactagcatcaagagtttgattgaataaagaggtgttattggtgaaacgaatttgcggtgcgcgtctattgtttatgcttatcttatcggctgcagtcctgatttgcggaggaaaaggcgcatacggggcggaggtcgagcattacgggccgcttcgggtgcatgtccagctggaaaaggtctatcttgacggtgatgtcggcattgaacatacggatgaaaccgttttagcgatggaggatttttgggccgcctacgccggctggacgctcgttgagcagaaaaaaggcttcgtccttttccgtaagcatgttgatgacatttccccgctcagtaaggttaacggttatatcggcgtcacggacggaggcgtcatctccacttttcacggccgtcccggatcgctggccgagccgattcagtctttcttccagattgatatagaaaggctggaaagccgattgcaaaagcacttggaacacggcataccgtacaggacaaaagcggagtttgagagcgtgatcgatcatattaagacttacagcggctgactttgacgcaagacatgtgacacatgtcttttttttctgaatggaaggtgtcaaagcgaacatacgttaacttttctataagactttggctgtttttgtgttacaatgataagcagtcaaagaggtgaataggtgtgattgaattcgtgaaggggacgattgattatgtatctccccaatacatcgtgattgaaaacggcggaatcggctatcaggtcttcactccgaatccgtttatttataaggtaagcaatcaagagaccatttttacgtatcatcatataaaagaagacgccttttctttgtacggtttttcaacccgggaagaaaaagcgcttttcacaaagctgctgaacgtcaccggcatcgggcctaaaggggccctcgccatcctcggttccggtgatcccggagctgtcatcgaagcgatcgaacaggaagatgaagcctttttggtgaaatttccgggtgtgggcaaaaaaacggcgcggcagattattcttgatttgaaaggcaaactggccgacgtcgtgcctgaaatgattgacaacctgttcaatcatgaagcgcgcattgaaaaacaagaggctgaaacggcgcttgacgaggcgcttgaagcgctccgggttctcggctacgccgaaaaagaaattaaaaaagtgcttcctcacttaaaagaggaaacggcgctttcaacagatcaatatgtgaaaaaagcattgcaaaaattattaaagtaaggtgatgttcatggatgaacggctcgtttcaagtgaagcagacagccatgaatcaataatcgagcaaagcctcaggccgcagaatctcgcccagtatatcggccaaaagaaggtgaaagaaaatctgcgcgtgtttatcgatgcggcgaaaatgaggcaggaaacgctggaccacgttcttttatacgggcctccgggtctcgggaaaacaacgcttgcgtctatcgtggccaatgagatgggtgtggagatgcggacgacgtcaggtcccgccatcgaaagaccgggagatttggcagccattttgacggcgctcgaaccaggggatgtgctgtttatagacgaaattcacaggctgaaccgctcaattgaggaagtgctgtacccggcgatggaggatttctgccttgatatcgtcattggaaaaggcccgtccgcccgctccgtccgtctcgaccttcccccttttacgcttgtaggagcgacgacaagggtcggattattgaccgcaccgctcagagaccggttcggggtgctgtcgcgccttgaatactatacgcaggaagagctgacagatatcgtgtcaagaacggctgacgtttttgaagtggatatcgaaaaagctccggctctggaaatcgccagacggtcaaggggaacaccgcgggttgcaaaccggctgctcagaagggtgagagattttgcccaggtgctcggcgacagccgcatcacggaagaaatcgctcacgatgcgctcgaacgtcttcaagtcgatgcgctcggcctcgatcatatcgaccataagctgctgatgggcatgatcgaaaaattcagcggcggtcccgtcggccttgatacgatttccgcgacaatcggcgaagaaccgcatacaatagaggatgtgtacgaaccgtatctgctgcagatcggatttctccagaggacgccgaggggccgggtcgtgactccggcagtgtatgaacattttcgattggaggcgcccgcccgtgactgactttccgaaggttctcatggttctcggtgccgttttgcttattgccggcgcagtctggcactttgtcggaaggctgcccggagatattttcgttaagaagggaaatgttacatttttctttcccgttgtcacttgtattgtgatcagtgtgatactatccattctgcttaattttttcggcagaatgaaataacaatagacagaattaaggtgaaatgatgaaagtcgatttatttgattttgaactgcctgaacgcctcattgcccaagtgccgctgaaagagcgtgacgcatcgcggctgatggtgctcgacaaacagacgggcgggctgacggacagttcatttaaagagattgtaagcttttttaatgaaggggattgcctcgtcttgaacaatacccgtgtgctgcctgcaagattattcggcacaaaagaagatacgggagcgaaagtggagcttctgttattaaaacaggaagaaaatgatacatgggaaacgctcgtaaagccggcgaaacgcgtaaaaaaaggaacggtcctgacatttggcgacggccggctgacagcggtctgcacagaggagcttgatcacggaggcagaaaaatagaattccggtatgacgggattttttacgaagtgcttgaatcactcggtgaaatgccgctgcctccttatattaaagagcagcttgatgataaagaacggtatcagaccgtcttttcaaaagaaatcggatctgccgcagctccgacggccggacttcattttacggaagagattctggacgagctgaagcaaaagggtgtgcggattgaatttatcacacttcatgtgggactcggcacattccgcccggtcagtgcggatgatgtggaagagcataacatgcacgcggaattttatgaaatgacggaagaaaccgccgcctctttaaacgaggtcagaaaggcgggagggcgcattgtgtcggtcgggacgacatcaacgcgcaccctggaaaccattgccggcgagcatgacggcgtatttacagcttcaagcggctggacgtccatcttcatttatccgggatatgaatttaaagcgattgacggcatgatcaccaattttcatttgccgaaatcttcgcttatcatgctcgtttctgcgcttgccggcagagagcatgttctttccgcctaccgtcatgcggtagaagaggaatatcgtttcttcagctttggcgacgccatgctgattatctaatttgaatgacaggaggcctcatacaaagtggctgaacaaccgatacgttatgaatttataaaggaatgcaaacaaacgggagcgcgactgggcagagtccatacgccccacggctcctttgagacgcctgtatttatgccggtcggcacgcttgctacggtaaagacgatgtctccggacgagctgaaatctatggatgcgggcattattttaagcaatacgtaccatttatggctccgcccgggacatgacattgtaaaagaagcgggcgggcttcataagtttatgaactgggaccgcgcgattttaacggattccggcggttttcaggtcttttcattgagcaagtttcgtaatatagaagaagaaggcgttcatttccgcaatcacttaaacggagacaagctgtttttatctccggaaaaagcgatggaaattcaaaacgccctcggctctgatatcatgatggcgtttgatgagtgtccgccgtatccggcagagtatgattacatgaaacgttctgtggaacggaccagccgctgggcggaacgctgcctggaggcgcacgggcgctcagatgagcaggggctgttcggaatcgtacagggcggagaatacgaagacctgcggacacaaagtgcaaaagacttggtttcgcttgattttccgggttatgccataggcggattatctgtcggcgagccgaagcacgtcatgaaccgagtgcttgagtttacaactccgcttttaccgaaggacaagccgagatatttaatgggtgtgggttcaccggatgccttaattgacggcgccatccgcggcgtggatatgtttgactgcgtactgccgacccggattgcccgaaacggcacggtgtttacgaatgaagggcgtctgaatatgaaaaacgccaaatatgagcgtgatttccgtccgattgacgaagagtgcagctgccatacatgccaaaattactcccgcgcttacatcagacatttgatccgctgcaatgaaacgtttggaattcgattaacaacttaccataaccttcattttctgttacacttaatggagcaggtcagacaagccatccgggaggatcgtcttggtgatttccgagaagagttctttgagcgttacggctataataagccaaatgcgaaaagcttctaaataaaaccattcttgaaaggagggaaacagatgggtactttaggcacaatcgttcctattattttaatgtttgcagtgctttatttcctgctcatccgtccgcagcaaaagcagcagaaggccgtacgccagatgcaggaagagctgaaaaaaggggatacagtggtgacaatcggaggattgcacggcactgttgattcaattgatgaaagcaaggtcgtcattaaaacaggtgataacacccgtttaacatttgaccgccgcgcaatcagagaagcttccgctgaataacagcgaagctcatacatacaaaaaaagagcggattctccgctctttttttattacgctgatctgcttcctttcaaattcactccgaaaatgccgcccagcatgctgactcccaaaaagccgagatgaaacaaaagctgaccggatgtaaacgtttttccgaaccctaaatattgaaacagcaagatgattaatgaaaaacagacggcggttaaagccccgatcatccagcctttttccttcgctttgccgcccgatataaaaccgcccgcaaataaagaaagaaaggaaagcgcggtgatcagccagctgaaagatgattcttccattgaggtaaccgtcagtaaaagcgaaatcgccaaactcgtaagaagcatcaccgcaaagatagccactaagccatacaagacgcctcttcccacttgtttcgtttcttccatttttatctcctctccgccctgcggcctgatatatgacaagccggagcccgtctttttctaaatgtattctctgaatgttcgaattagacgtaaatgcatgatgttcagcccgtttcttacataattcagagccgatggcaaatgctatgaccgttggaggtgcgatatggaagatattttcattattacgtttcgtacgattgtgctttattttatcattcttgtgattttcagactgatgggaaaacgggaaatcggagaactgagcattttagaccttgtcgtctccattatgattgccgagattgccgtattggcaattgaaaatgtaaaagataagcttttgcatacaattgtgccgattgtcgttttaatgattattcaagtaagccttgcttttatttcgctcaaaagccaaaaaatacggcagctgcttgacggaaaacccaccattattataaaacagggaaaaattgatgaacgggcgatgagatcgcagcgctacaattttgacgatcttcttatgcagctgagggaaaataacatcgatagaatctctgacgtgtcatacgccattttggagtcttcaggcaaactgtcgatcgtcaaaaagaaaaacaataaggataagcagatggaaacatcgcttatcgttgacggggtcattcagaacgagcacctggacagaatcgggaaagataaacactggctcgaaaaaaatttagcaaaaagaggatatcgcgatctttcggttatatcattctgcacgtttacggacggcgctttttttattgatcttaaagatgaaaaaggggagccataaatgggttttaccgcgtcacgaacttgccgatgaccggaatccggatcagctcttcccttttaatcagcctgaataacagaagaagcgctatgtacaaaatcgcggtcattgcaatccagcctgtgagattaacagcctctgaccctgaaaaatgaacggcgtgtttgatgatgcggctgacataaccgcaaatgaatatgacggcaaaacagagcgcgtattcttttattttaatgctgatcggaagcaccttgcttacggtggccgcatgcagcagggtgacaaggaccatccctgttacaatcgcaagtgcggcgcccatgatgcccaaggaaggcctggtcgccaaaacaaaaatcaggccggttttgacagcggcgccgataaaactgttcatcatggcggccccggctaaattgagagcctgcagcaccgcctgaagtggcccctgaaaatagtaaagcagaaaaaacggcgccatcactttaacaaatatcgccgcattagttgatccgtacatgacggacatcagttcatcagcgaaagagaataaaataaccaccgaaatgcctccgcttaaaagacacagcctcatcgcctgttccagacggtattcgacaacttgcagctttttttgctccatcccttcactgatcgcaggaacaagcgccgttgacagagaataggttataaagctgggcagcgtcaaaaccgtcatggcaaatccggtcagctccccgtactggctggtggcggcagcggttgccactcctgcaatcgcaaggctctgcgcgacgacaataggttcaaaaaaccaagataaatttccgatgaagcggcttccggttgtcgggagcgacacgctcatcagctggcggaaggtttcttttccatttgcaatcgacttgaaaaattgttttctgattctgattgttttatttgctttaaaacaaatgaataaataaataagagaggcaagctccccgatgacagacgaaatcatggctccggctgcggcatattcaatcccgtacggcagaaacaccgtcgtgcagaccgcgacaagtgaaatccgcacgatctgctcaagcacttgggaaaacgccagcgggttcatattctgcctgccctgaaagtaaccgcgcagcacgctggagatcgcgataatcggcacgacgggcgtaatcgccagaagcgggtaaaccgtgcgctgatccgtcagcatcgtttcggacataatcggcgcaaagcataaaaacagcggcgtgaagatgagacttaatatcccggtgacggtaagcgacatcactaaaatgtgtttcattttctgccggtccccccgtgcgcttgcttcagcgacaagtttgctgatggcaacggggaggccgaattgagtcaaagtggtggccaagaaaaatgtcggggcagccatcatgtataaaccgaccccttcttcaccgataaaccgggcgataaccacccggttgacaaagccgagcattctcgtaaccatcccggctgcgatgagaataagagtgccccttaaaaaagtctgttttgccattttataaacccctgccttctcaaactacctggaatcatatacaataaagatatgcgccgatgtcgtccgagcatgacaagtcttcgagaaaaatggaaaaaggagcgagcgcccagtggagaaacatcccgccgaaatgtacaaagatcatttgcggcctttcttgtacagtaaacttgaagagttcaaaatcctcggatacgatgatgttgagcacgagagtttatggtcatacttaatacataaaaagtggaaacagaaaaaggaactgccgctgtatgaattggccggcaatattttatcagttaaaattggcgattttatgaactatgcaaccgtcgaagcttttaagtcgtctaattggctggaaagcgatgagggtcaggaagctttagatgaactgctgagataatgatttgacggcataggtttaaggaggaaatacataatgaaaaaaggacgcttgattgcgtttttcctgatcgtattattgatcggcacagggctggggtattttacaaaaccggctgccaataatattacgttaggattggatttacgcggcgggtttgaagttctgtacgatgtgcagcccgtcaaaaaaggcgataaaatcacaaaagacgtactcgtcagcacggtgcaggcgctgaaccgccgggctaacgttctcggcgtaagcgagccgaacattcagattgaaggaaataaccgcatccgcgtacagctggcgggtgtcacgaatcagaacagggcgcgcgaaattctgtcaacggaagcgcagctctcgttcagggatacgaatgataaagagcttttaaacggctctgatctcgtggaaaacggcgcgaagcaaacctttgatccgacgacaaacgaaccgattgtcagcgttaagctgaaggatgcggataagttcggagaagtgacgaaaaaagtcaagaaaatggcgcctaataatcagcttgtgatctggcttgattaccaaaaaggcgattcatttaaaaaagaagtcggcaaaaaacatccgaaatatgtatccgctccgaatgtgagccaggaattaaacacgaaggatgtcacgattgaaggtcaattcaccgttcaaaaagcgaaggacttggccaatattttaaacgcgggcgcgctgcctgtgaaactgaccgaaaaatactctacttcagtaggggcgcaattcggacagcaggctttgcatgatacggtagaggccggcatcatcggtattgcaattgttttcttatttatgctgctttattacagactgcctggactcatagcggtaattacgctttctgtatacgtgtatattacgcttcaagtgtttgactggatgcaggcggtgctgacgcttccgggtattgcggcgctcattttgggtgtcgggatggcggttgacgccaacatcatcacctatgaacggataaaagaagaactgaaactcggcaaatccgtccgctcagctttccgttcagggaacagacggtcattcgcgacgattttcgatgcgaacatcacaacgatcatcgcagcggtcgtgctctttattttcgggacaagctctgtaaaagggtttgcgacgatgctgattctgtcaattctgacaagctttattacagctgtctttctttcaagattcctgctctcccttcttgtggaaagcagatggcttgaccggaaaaaaggctggttcggcgtcaagaaaaaacatattatggacattcaaaaaacggatgaaaatactgaaccgcatacggcattccaaaaatgggatttcacgagcaagcgaaaatatttctttattttctcaagcgctgtaaccattgcgggaattatcatcttactggtctttaagctcaacctgggaatcgattttgcaagcggtgcgcggattgacgtgcagagcaatcatgcattgacggcgcagcaggttgaaaaagactttgactctctcggcatggaaccggaaaacatcgtgctttctggtaaagagaaccatgttgccgcggcccggtttgtcggagagccatctaaagaaaaaatcgctgaaatcaaaacgtactttaaggacaaatacggatctgagccgaacgtcagcacggtatcgccgacagtcggaaaagaactggcccgtaatgccttatatgccgtcgccattgcatcaatcggcattattatttacgtgtcaatccgtttcgagtacagaatggctgtcgccgcaattgtatccctgctgtatgacgctttctttatcgtcgcgtttttcagcattaccaggctggaggtcgatgtcacctttatcgccgcaattctcaccataatcggttactcgataaatgatacgatcgttacatttgaccggatacgtgagcagatgaaaaaacgcaagccgaagtcatttgccgatctggaacatatcgtgaatctgagtttgcagcaaacctttacacgttcgatcaatacggtcttgaccgttgtgattgttgtcgtcgtgctgctcattttgggctcatcgtcaattacaaacttctccgtcgctttattggtcggtttattgacgggcgtttattcctctctttacatcgccgcgcagctgtggcttgtatggaaaggaaaagaatttaaagggaaaaaatcaatcgaagagtaaaatgggaacaggctgtcttgcagaaggcagcctgttttttcaggccgcattgaacttaaaacctgcatttgctataatgacatacgcttacataatcaatcatcattgtaaaaacatgtaggagggttcttatgaacgttcgtgagtcggagcttccgggcatcggccagaaagtagaagtcattacgaaaaatcacgataaaatcagtattattcttcatgatgacggcagaaaagagctctattacttcgatgagaatgatcatgacgaatgcttggcatccgttgaatttaacgacgaagaggcgaggcagatttccgctattttaggcgggatgacgtataagccgaaagcgctggaatctgtggaagttgcgcttgatgacctcgtcattgagtggtttaaagccgaatctcatgcaccggctgtcagccgtgcaatcggagatttggagatcaagaaacattacaacgtccagattattgcgatcgtaaagaaaaaccggcaaaaacagctgagccccggcattgataccgtaattgaagcaggggacaccctcgtcatatcgggagaaagaagcggactgaaaaagctgatccgcgagcagttaacggcgcggatttcctgagaccggggtttactcccgggaaaatgggggaaaagataagaatgaacaattgggggcagacgcatgaataaacaatggactattatattcgctttactatttactttgattgtcgccatctttgctgtcattaacgtgcgggcggttgaggttgattatctgttcggaaccgctgaatggccgctgattttagtcattttaggctctgtgttaatgggagcgctgatcgtgttttcagccggtatctttcaagtgatgaaactgaagcgcgaaattaaaatgctgcggaaagaaaacagatccgcaggtgaattgacggctgattcggacggccaaaaaacagccgcgccgccggaagaaatgcttgaagagaaaaaaggatcagaataacatttgaaacccctcagcccgctctagtataatagggtggttgaggggtgaatttatgttagcgtcaaaaatgcgctgggaaatccagcagccggatcaggaaaaagtcaaatcactcacagaacaattggacataacacctcttgtggcatcactgcttgtaaaaagaggttttgatactgccgaaagcgcaaggctgtttttacatacaaaggatgcagacttttatgacccgtatgaattaaagggaatgcgggaagcagttgatcggataaaactggcggtttctcaaggggaaccgattatgatttacggagattacgatgcagacggcgttacaagcacgtcagtgatgctgacggcactcagacagctgtcggcggacgttgacttttatattcccgaccgttttacagaaggctacggcccgaatgaacaagctttccgctccataaaagagcggggattttcgctgatcattacagtggatacgggaatcgccgccgtccatgaagctgaagtcgcaaaagagctgggcttagacgtcattattaccgaccaccatgagccgggacccgagcttcctgacgtatttgcgatcatccacccgaagcagccgggctgcggctatccgtttaaagaattggccggcgtcggtgtggcgtttaagcttgcccacgcgcttacgggttctttgccggaagctatgctggacttggcggcaatcggtacggttgcagatctggtgcctcttcatgatgaaaacagattaattgcgtcactcgggatcgaaaggcttcggacgacaaatcggccgggcctcaaagctctgattaagctttccggcggagatatcggacaagctgatgaggaaacgatcggatttcaggtcgcaccgaggctcaatgccgtcggaagaatagaacaggccgatcccgccgtgcacctgctgatgactgaagatcagtttgaagcggaggaactggcttcggatattgaccggctgaataaagagcggcagaaaatggtgaaaaccatgaccgaagaggctgttgaaatggttcagcagcaaggcggaaacccgtctgccattgtagtggcaaaagccggctggaatccgggagtcgtcggtattgtcgcatcgaagctggctgaacgtttttaccggcccgctgttgtgcttgggatagatgaggagcagggaatcgctaaagggtcggcgcgaagcatcagaggcttcaacctgtttacgagcctttcacagtgcagagacattcttcctcatttcggcgggcatccgatggcggcaggaatgacgttgaaggctgaagatgtggcggaattaagggacaggctgaatcaaatggctgaagaaactcttacggaagaggattttattcccgttcaggaggttgatcttgtctgcggcgtagaagacataaccgttgaaagcattacagaattgaatatgctgtcgccgttcggcatgcttaaccctaaaccgcatgtgatggtgaaaaatgccgtgcttgatgatgtgcgcctgatcggagcgaataaaaaccacgtgaaaatgacggtgaaaagtgattccgccgtccttgactgcgtcggctttaacaaaggagagcttgaagccggagttgtccccggatcaacgatttccattgtcggcgagatgtccattaatgaatggaacaacagaaagaagccccagctgatgattaaagatgctgcggtgccggaatggcagctttttgatatcaggggcaagcggacgtgggaagacacggtcaccgcgctgccgaaggaaaaacgggtgctcatcagctttaacgaaaaaaccgctcagaagctccgtgaaaaagagctgtcgggcgagcttgccgggatcacttcggaatccgaggcgaaagctctccagcttgacggaaaatatgccgtttttctggatgtgccgccgtcagcggatcgtctgcagcatttgcttgacggaaagaagccggaacggatttattttgtttttatcaatcatgaagaacatttcctgtcctcatttccatcgcggaatgatttcaagtggttttacgcatttctcttgaaaaggggcgcttttgacttcggcaagcatggttcagagcttgcgagacacagaggatggtcaattgacacaatcaatttcatgacaaaggtgttttttgatctcggttttgttaaaatagaagatggtgtgctgtctgtcgtgagcggcgcgaaaaaacgcgacctggcagattcgcaaacctatcaggtaaaacagcagctgatggaattagaccagaagctcaattattccgcagcccatgagctgaaggaatggctgaataagctgatgaaccaaggttcagaagcttatgaaagtacgaggaggacatagaacagatggatcttaaaaaatacgtaacaattgtgcccgattacccgaaagaaggcgtacaatttaaagatattacgacattgatggacaaaggcgacgtataccgttacgccactgaccaaattgttgaatatgcaaaagaaaaagaaattgatttagttgtcgggcctgaagcgcgcggctttattatcggctgtccggttgcatacgctctcggagtcggctttgcgccggttcggaaagaaggaaaacttccgcgtgaggtcattaaagtcgattacggtttggagtacggaaaagacgtactgacaattcataaagatgcgattctgccgggacagcgcgtgctgattactgatgacttgcttgcaacaggcggcacgatcgaagcaacgattaagctagtcgaagaactgggcggcgtcgtagccggtattgcgttcttaatcgagctttcttaccttgacggcagagacaagcttgacgattacgatattttaacattaatgaaatattaaccgcatatggaaaaaagcactcgtgtcagggtgcttttttcctattatttcatcatcctgacagattctttaggtgttttgaacttctgccctttacatctctcgtttttttcttgataataaactaatacagtttacatttaaaaaaggtgattccatggcgaacgaacaagtattgactgccgagcaagtaatagataaagcgcgcacttatctgccggaggagcagattgcgtttgttgagaaagcttacctgtatgcgcaaaacgcgcatcgcgaacagtaccgcaaatcaggtgagccgtacatcattcatccgattcaggtggcggggatcctcgtcgatctggaaatggacccttccacaattgcgggcggatttctgcatgatgtggtagaggacacggatgtcaccctcgacgacctgaaggaagcattttctgaagaagtggcgatgcttgtcgacggcgtgacgaagctcggtaaaattaagtataaatctcaagaagagcagcaggcggaaaaccatcgaaaaatgtttgtcgctatggctcaggatatcagagtcatattgatcaagctggcggatcgccttcacaatatgcggacgttaaagcatcttccgcaggaaaagcagcggagaatttcaaatgagacgctggaaattttcgctccgctggcccatcggctcgggatttctaaaatcaaatgggagcttgaagacaccgctctccgttatttgaatcctcagcaatattacagaatcgtcaacctcatgaagaaaaagcgtgcggaacgcgaactttatgtcgaagaggttgtcaatgaagtgaaaaaacgcgtcgaagaagtgaatatcaaagcggacttttcaggacgtccgaagcacatctacagcatttaccgcaagatggcgctgcaaaataaacagttcaatgaaatatatgatctgctcgccgtccgtattcttgtcggaagcattaaagactgctacgccgtactcggcattattcatacgtgctggaagccgatgccgggcagattcaaagattatattgcaatgcctaagccgaatatgtatcagtcgctgcatacgaccgtaatcgggcctaaaggcgatccgctggaagtgcagatcagaacgtttgagatgcatgagatcgctgaatacggggtggctgcacactgggcatataaagaaggcaaggctgcaaacgaagaagcgacatttgagaaaaaactgtcctggttccgtgaaattcttgaattccaaaacgagtctaccgatgcggaagaatttatggaatcgctgaaaatcgatctgttttctgacatggtatacgtatttacgccaaaaggcgatgtcattgaactgccgtcaggctctgtgccgattgatttttcctacagaatccactcggagatcggcaacaaaacaatcggggcgaaagtgaacggaaaaatggtgacgcttgaccataagctccggacgggcgacatcgtcgagattctgacgtccaagcattcatacggtccgagtcaagactgggtcaaactggcgcagacgtcccaggcgaaacacaaaattcgccaattctttaagaaacagcgtcgtgaagaaaacgtcgaaaaaggccgtgagcttgtcgagaaagaaattaaaaatcttgattttgaagtgaaagatgttttaacactcgaaaatcttcaaaaagttgccgacaagttcaatttctctaatgaagaggatatgtatgcggcggtcgggtataacggcattaccgctcttcaggtggccaacaggctcaccgaaaaagaacggaagctgcgtgaccaggaagagcaggaaaaaatcgttcaggaagtcacttcagagccgaaacattatccgcaagggagaaaacgggaagcgggtgtgcgcgtaaaaggcattgacaaccttctcgtccgcttgtcgaaatgctgcaacccggtgccgggcgaccatattgtcggttttattacaaaaggccgcggtgtatccgttcaccgggatgactgtccgaacgtcaaaacgaatgaagcgcaggaacgtctgatccccgttgaatgggagcatgaatcacaggttcaaagacgcaaagaatataacgttgagattgagattttggggtatgaccgtctcgggcttttaaatgaggtgctccaagccgtaaatgagacgaaaaccaacatctcctctgtctccggcaaatccgaccgcaataaagtcgctacgattcatatggcgatttttattcaaaacatcaaccatctgcataaagtggtcgagcggattaagcagatcagagacatctattcagtccggcgggtaatgaactaaaaggagcttgctatgaaattagttgttcagcgtgtaacagaagcaagtgtgacggttgacggcgctgtcgccggccggatcggacccggcattatggcgcttgtcggcatcactcatgaagatacagaagaagatgccgcttacttggcggataaaatcgtgaatctccggatttttgatgatgaaagcggcaagatgaatttatcgcttttggatacgggcggggagattttatccgtttcccagtttacgctttacggcgaaacgaagaaagggagacgcccgaattttatgaatgcggctaaaccggatcaggctgtgctcctttatgaaaagtggaacgaactccttcgggaaaaaggagtcaaagtggaaaccggaatattcggagccatgatggatgttcagctgacgaattccgggccgattacattgattatggattctaaacaataaaaaagctgccgttcggcagcttttttttatgattgaaaataatgttccaatccgctttcaattccgtctgtcactttttcctgataagagccgctatgtatgattgtttcttcttgcggttggctgagatagccgagctcatacagcatggcaggccgtttattttccctcaggacgtaataatcgccaaacagaacgccgcgatccgggataggggaacgcttcactacttcagaatggacgtctgaggcaagctggcgatccttagacggactgtaataataagccgtgcttccccgcgttgacgtatcggcatagctgtcatagtgaatgctgataaaggcatccgcattccggtaatgagaggttgaaaccctggcctgcaggctgataaaagtatcatcctgtctggtgatatacacgtttgcaccggatgcccgcaatttttgggccagcagcttagcggttttaatggttacgtttttttcaaactttccggagtagccgatcgttccgctgtcttttcctccgtgtccgggatcaacgacaatcgttttgtttttaagtgagccgctgccgcctgacgtgttgggagaaggtgcttcgcctgtttcctcaccgctttttgacgtttgtacgacccagcttgccacatatgcagtttgtccgttttcaagccggacttcataccatttgccgcttgagccgacaatcgggtagactgcgcctttatctgctctttttacgatagaagcggaagtcgaggccgagctccttaagttggtgccgccgtacacaatatacgcttttttcgaggagcctgagcccgcagaaccgtctcccgagccggatgcgctgtccgatgagtcagaatcctttatgatgtagtggcttgctgcccagcctttttgcccgtttgcttcaattttcagccagccgtggtcttcacttaagatggaaacctttgttccgcgtgataatttagtcataatcgctgaatcgtgtgacgctgcacttctgacattcaatgaagaaacgccgaccgtcccgtattttgacccgcttcgggccgaagttgctttcgtatccgatccgccgctgtccgcggtgacgtattcggaagaaacccatccggttgtgccttgataagaaatgttcacccatccgctgttcttgtccagcacggatgcatgtgcgccttgcggaagtttgccgatgacttcatatgatgtccccgggccttttctgatgcggaggtcaggatcggttgaagtgaccgttccgcttgttgcggatgaattgtctgctcccccggctgtttttgatatcagccaggaaacgacccatccggttttaccggggctcagctgaagctgcacccagtctccctcttctttagcgatcgggtatctttcccctttttttacttcagccttaattccatagctcaggccgggaccgcctctgacattgatcttgtctgtcgcgatgaccgcttctccctctgcggcgattgcggtgtggaatgacggaagaagcgctgtgatgatgacgccgcataaaataagagcaagagttctcttcttcatggctgtcctcctttctgaactaactaaaatacattcttgtataatatcgtattttccttgctgaatgttaaataaaaataaaatggtttgtttatactagtcataaatacagcgaaaaggtgtgcaaatcatgaaatatcaaccaaaaatgggacgcgcgctgcacgatgcagaaggaaatctgcacttcagtgatcagagcgatagagaaaaggcgggttttcttgaagagacggcgacggagttcggtctcttatcgaaagaagcggtcgcaaggaaaaacagacggaataaaacttgacaggggagtgcaatcccattattataatagaaattgatgtacataagtcatgataacgattttgaaccgataatggagaagagtaggtcagaatgcatggagaagagaggaaccgccccgggctgaaagcggatccgcactgcatctttctcgaaacaacactccggaggttccctgctgaacgcttttgcaagtcattaggcagcggacgtgaacctgcgttaaaggtcagagcggggatgcttcggcattccaactagggtggcaccacgggtataactctcgtccctactatacatgtatagtaggagcgggagtttttttatttgaagaaagacattaaggaggcctgtaacatggcatatcacattccaagaggcacacaggacatactgccgggtgaatcagacagatggcagttcgtcgaacaaattatgagggagacgtgccgcacttatcaatataaagaaatccgcacgccgatcttcgaacatacggaattgttcgcaagaggcgtcggtgagtctacagatatcgtgcagaaagaaatgtacacgtttgaagaccgtaaagggagaagcctgacgcttcggccggaaggaacagctgccgcagtccgcgcgttcaatgaaaataaattatttgcgaacccggtgcagccgacgaagctttattatgtcggaccgatgttccgttacgaacgtccgcagacggggcgtttccgccaattctatcaattcggaattgaagcgatcggctccaaagatccggccgtggatgcagaagtcattgcgcttgcgatgagtatttaccgtaaagccggtttgaaacatgtcaagcttgtgctgaacagccttggtgaccaggagagccgcaaatcctatcgggaagcgctcgtcaaacattttgaaccgcgcatcggagaattttgctcggactgccagtcgcgtctgcacacgaacccgctcagaattcttgactgcaagaaagacagagagcatgaactgatgaaaacggctccgtccattcttgattacttaaatgaagaatcagccgcttattttgagaaagtaaaacaatacttaaacgatctcggcatcccgttcgaaatagatccgaaccttgtcagagggcttgattattataaccataccgcttttgaaattatgagcaatgccgaaggattcggagcgattacaacacttgccggcgggggccgctatgacgggcttgttgaacagatcggcggacctgaagcgccgggtatcggatttgcgatgagcatcgaacgtctgctggcagccattgacgctgagaaaacagagcttcccgtcaatcaggggattgactgctacatcgtgacgctcggagaaaaagcgaaggattattccgtttccctcgtgtacaaactgagagaagcgggcatctcaagtgaaatcgattatgaaaataaaaagatgaagggccaattcaaaacggctgaccgtctcggcgcacgttttattgcgattttaggggaagatgagcttgcccagaataaaatcaatgtaaaagatgcggaaacaggagagcagcgtgaagtggtgttagacgagctgatacaagtgttaaaggcagatcaaaagcagtgaaggagaggaacgctatgtttggaagaacatattattgtggcgagataactgaaaaagcgattggcgaaaccgtcaaactgaaagggtgggtgcagaagcggcgcgatctcggcggcttgattttcattgatttgcgtgaccgctcgggtattgtgcaagtcgtgttcaaccctgacgtatcgaaggaagcccttgccgcagcggaagcaatcagaaacgaatatgtgcttgatatcgaaggcacggtttctgcccgtgaagaaggcacggtgaatcccaacctgaaaaccggtaaaattgaaatcaaagctgaagcggtgacggtgctcagcacggcgaaaacgcctccgtttccgatcagtgaccaggcggctgacgtttctgaagacgtccggttaaaacaccgctatttggatttgcgccgcccggcgatgtttcaaacattgcaaatgcgccatcaagtcacaaaatccatccgccatttcttggatgaaaacggatttcttgatattgaaacaccgattttaacaaaaagctctcccgaaggcgcccgtgattacttagtgccgagccgggtgcatgaaggagaattttacgcccttccgcaatcgccgcagatttttaaacagcttctgatggtgtctggctttgaacggtattatcaagtggcccgctgcttccgcgatgaagacttgcgtgcagaccgccagccggaatttacgcagattgatatcgaaatgtcctttatgagtcaagaggacatcatggctctggcggaagagatgatggcgaaagtcatgcttgaaacaaaaggtgttgaagtaccgctgccgcttccgcgaatgacatatgaagaagcgatgaacagctacggttccgacaagcctgacacccgcttcggcatgctgctgacggacgtgtcagacatagtgaaagatactgaatttaaggtgttctcatcagccgtggcaaacggcggcgttgtaaaagcgatcaatgtcaaaggcgctgccggcgactattccagaaaagatatcgatgcgctcggcgtatttgccggaaattacggcgcgaaaggtctcgcttgggtgaaagttgaagctgacggcgtaaaaggcccgattgcgaaattctttgatgaagagaagcaggcaaaactggctgaagcgcttgatgcttctgaaggcgatctgctcctgttcggcgctgataagtttgaggttgtggctcaatccctcggcgcgcttcgcttaaagctcggcaaagaacgcggtctgattgacgaaagcctcttcaacttcctgtgggttgtggactggccgttactggagcatgacgaggaagaaggccgtttctatgcggctcaccacccgtttacaatgcctgtccgtgaagatcttgacctgattgaaacggcgcctgaagatatgaaagcgcaggcttacgacctcgtcttaaacggctatgaactcggcggaggctcaatccgtatttttgaaaaagacgttcaggaaaaaatgttcgggcttctcggctttacaaaagaagaagcggaggaggagttcggataccttctcgaagcctttgaatacggcgcacctccgcacggcggaatcgcgctcggcttagaccgtttggttatgcttcttgcaggccgcacaaacttaagagatacgatcgctttcccgaaaacggcaagcgcaagctgccttcttacggaagcgcccggcgaagtgagcgacgcccagcttgaagaacttcacctttctgtcaaaagaaaagtgaaacagtaaagatcagcagtttgtttcttgaaaatcaaaatctgctgtgatatgattttgacaagttaaataaagtcctgatgtgttagttgtacacctagttttgaccgaacatttttttgatttgggagcccgtatttttaaatggcgtacatgcctcttttcattcgttaagaggacttacaagatttaaaaaagggcacccacctgctgagagcgggttcaaaacgaaggaaagctgcaacggcacaattgggactttattttttgtgcgctaaaaccagcggctttttgacaagccgagtttataaaaccagaatgtggagtgaggttcttgttacatcagttttccagaaatgagctagcgattggaaaagaagggctggacacgttaaaaaacagcacggtggccgttctcggcgtcggcggagtcggttcattcgcagccgaagcattggcgaggtccggagtggggcggatcgtgcttgtcgataaagatgatgttgacattacaaacgtaaaccgccagctgcatgcgctcttgtcgacggtgggacagccgaaaacagacttgatgaaagcgcggatcgcggatattaatccggattgcgatgtcgtcgccttaaaaatgttttatacagaagagacatatgagcagttctttgagtatccgcttgattacgtcattgacgcgtcggatacgattcattataaaattcatctgatgaaagaatgtctgaaacggaatgttccgctgatttcaagcatgggagcggcgaataaaacagacccgacacgctttcagattgctgatatttcaaaaacccataccgatccgattgccaaagtcgtccgcacaaggcttcgcaaagagggcattaaaaaaggcgtacaggtcattttttctgatgaaagcccgatcgtcatccgtgaagacgtcagaaaagaagtcgggaatgatgaagcgaaaatccgcaaagcgcaaatgccgccgtcttccaacgcctgggttccgtcagtggccggtctgattatgggcggacatgttgtcatggagctcttaaaggacatcgacattaaacgggttaaagataaataaagagaaaaacagccttcttcaggaaaggctgtttttttatttgaatccgccgtttacacgaaagattttggccggtatcaaaaaagacaagaacacatagggtgtccttgtccggttattttttctgcttcatcagtttttcatacacttgctttatggctgcttcaaatttccccgtttgtttcggtttatagtattgcttgttttttaacggatcgggcaaatattgctgttcgacccatccgttttcgaaatcgtgaggatattgatagccgatcccgcgtccgagctcttgggcccctttatagtgggcgtcttttaaatgtttcggtacatcgccgattttacccgtcctgatgtctttgagcgcctcatcaacggctgagatggcggagtttgattttggcgagaggcataattcgattaccgcattggccagcggaattctcgcttccggaaagccgatccgttctgcggtctgaatcgcgctcagcacccgtgggcctgcctgcgggcttgcgaggccgatatcttcataggcgatcacgagaagccttcttgatatgctttcaagatcgccggcttcgatcagacgggccagataatgaagggcggcgtttgcgtccgagcctcggatcgatttttggaaggcggataagacgtcataatgcgcatcgccgtttttatcatgagtatagctttttttctgcagacattcttccgctgtttcccgtgtaatccggaccgtgccgtcgcttgattcctttgtggagagcacggcaagctccagtgcgttcaaagcggagcggacgtctcccccgcacccttgtgcgaaatgatccatcgcgtcgtcgtccaccgaaacgctgtaagaaccgagtccccggtgttcatctgtgagcgctcttttcaatgcctgcttgatcagatcgggtgttaacggttcaagctcaaatatctgggtccggcttctgatggccgggttaatggcatgataagggttggcggttgtcgcgccgattaaaataatcatgccgttttctaaatagggcagcagaaaatcctgctttcccttatcaagcctgtgcacttcgtcaaggattaaaatgacctggcctgacattttcgcttcctgtacgacaatctccatgtcttttttattatgaatgacggcattcaatttcctgaatgcgatgcttgtcgatcctgcgatcgctgtggcgatggacgtttttccgatgcccggcggtccgtacaggatcatggatgataagtgctttgcacgcaccattctgccgatgattttatcttctttgaccaaatgttcctggccgataatgtcttcaatattggcaggccgcatccgatacgccagtggtttcatgaacatctctccttacatatacagggtaacggaaaacggacgattagaaaagcgaattgcggcgggccccgtgtttcaatgaaaattaggataagttatgttataataacagttggtctataagatactaaacagattattcatatccatttacttgtataaattaacaattagaattgactggggtgttcatattgaaaatatcgacaaagggaagatacgggctcaccattatgattgaattggcgaaaaagcacggagacggtccgacgtcgctcaaaagcatcgcccaaacaaacagcctttctgagcattacttggaacagcttgtatcaccgcttagaaacgccggactcgtaaaaagcatcagaggcgcttacgggggttacgtgctcgggggccagcctgaagagataacggccggagatattatcagagtgctggaagggccgatcagcccggtagaagtgcttgaggatgaagagcctgccaagcgggagttatggatccgcatccgcgacgctgtaaaagacgtgctggacagcacgacgttagaagaccttgcgagctacacggacggcgagcaggaagcttatatgttctatatttaaaccagaggtgtacagacaatggaacggatttatttagatcatgccgcgacttccccgatggatgagcgtgtgctcgaagagatgaagccccatttcttcggtagtttcggcaacccgtcaagcattcattcattcgggagagaatcccggaaatgggtcgatgaagcgagagcggacatcgcgcgcgaaatcagtgcgaaagaacaggaaattattttcacaagcggcggcacggaggctgataatttagcgattttcggaacggctgccgcccggaagaatgaaggaaagcatatcattacgaccgctgttgagcatcatgctgtattgcacgcctgcgaaaagctggaagaagacggctttgaggtgacatacctcatccccggcccttcaggacggatcagtgcaaatcaggtgaaagaagcgctccgtgatgatacaatccttgttaccgtcatgtatggcaataacgaagtcggaaccattcagccgattgacgaaatcggagagctgttaagcgggcatcaggcctattttcacacagatgccgtccaggcattcggttatatgccgattgacgtgaaaaaaagcagaattgacatgctgtctgtttccggtcacaagcttaacgggcctaaagggacaggctttttatatgtaaatcaagaggtgaagctgtcaccgattcttctcgggggagagcaggaacgaaagcgccgcgcggggacggaaaatgtaccgggcatcgccggcttaaaagaagcggtcgtcctttcaaaccgtgagagggaagagaaaacagcgaagtataaggagtttaagaacatcatcatgagtacgctggaaaaatccggcgtcacagcggaggtgaacggagatgccgagaaatgcctgcctcatattttaaacctttactttcccggtgtgccggtggaagcgctgctggtcaatcttgacatggaaggcattgccgtctccagcggatctgcttgtacagcgggatccgttcttccgtcccatgtgcttacggccatgttcggaagtgagagcggcaggctgacttcgtcaatccgcctcagctttggcctcggcaatacggcggaacaaatcgaaacagccgccgaaaagcttgccgccgtcgttaaacggcttgcttaaaacggcggacttacgtttttaatggagtgaatgcaaatggaaaaacggccggaggatacaagagtcgtagtcggcatgtccggcggcgtggactcttcggtggcggcccttctgctgaaggagcagggctacgatgtaatcggaatctttatgaaaaactgggatgatacggacgaaaacggtttttgcacggcgacggaagattatgaagacgtcatccgggtctgcaatcagatcggaattccgtattatgccgtcaattttgagaagcaatattgggaaaaggtatttcaatatttccttgatgaatataaagccggaagaacccccaatccggatgtcatgtgcaataaagaaattaagtttaaggctttcttggatcatgctctgtcactcggcgcggattatcttgcgacgggccattacgcccgcgtggacagaagcgcaggtacagtgcgcatgctccgcggcctggatgaaaacaaggaccagacttattttctgaatcagctcaatcaggaacagctcagcaaagtcatgttcccgatcggtgatctgcaaaaaagccgcgtgcgggaaatcgccaaagaagcggaacttgcgacagctgcgaaaaaagacagcacgggaatctgctttatcggcgaacgcaacttcaaaacgtttctcagccaatatctccccgctcagccgggcgatatgatgacaatggacggagaagtaaaagggcgtcatgacggtctgatgtattatacaatcggacagcgccacggtcttggaatcggcggaagcggcgagccgtggttcgccgtcggtaaagatcttgaaaaaaacattctgtatgttgatcaaggattccataatccgcttctgtattccgataagatcacggcgacaaatgtcagctggacgcgtcccggtctgatggacggcggcgaaatgacatgcacggcgaaattccgttaccgtcaggaagatcacaaagtaacggtgaaaatgacgggtgatgatgaagcggtagtcatttttgacgggcaggtacgcgcagttacgccgggacaagccgtcgttttttatgacggagaagagtgcctcggcggcggaacgatagatgacgtctataaagacgaaacaaaattgtggtacgtataatacatgtaaaaaacctcaactcgcatgttggggttttttagcgaaaggaagttaaaaatggattataataaaatcgggattgacgccatgcaggagggcgattttgaaaaagcggcagaggcttttacgaaagcgattgaggaaaacggccaagatccggtgccgtatatcaacttcgcaaatctgctttcttctgtgaacgaactcgaacgggcgcttgcattctataacagagcgctcgaattggacaattcggcggcagccgcttattacggtgcgggaaacgtatatgtgatgaaagaatcgttttccgaagcgaaggatatgtttgaaaaagcgcttcgctccggaatggaaaacggagatttgttttatatgctggggaccgttctcgttaaattagagcggccgaagcttgcactgccgtatttgcagcgtgccgttgaattaaacgaaaatgacacggaagcacgcttccagttcggaatgtgcctcgcaaatgaagaaatgctggatgaagctctggcgcagtttgagacggtgatcgagcaggacccaagccacgcggacgcattttataatgccggagtcgcttacgcgtacaaagaaaatcgtgaaaaggcgcttgagatgctggaaggcgcaatcggcatacagcctgatcatatgcttgcgcttcatgcgaaacagcttatcacccagtcgtaacaaaaggagggaaggctcgtggatcagctgaacatcgaagaacagccgtatgtaaaaggcgtcattcatacggtcatttatcataatgacaccaacctgtatacagtgctgaaagtcaaagttgcagaaacgtctgaggcgatcgaagacaaggtcgtatccgtaacgggctacttccctctgctgcaagaagatgagacctacacattttacggaaaaaccgccacgcatcctaagttcggcctgcaatttcaggctgaacactttaaaaaagaaattccgaccacaaaagaagggatcattcattacttatcaagtgatctgtttgaaggaatcggaaaaaaaacggcggaagaaatcgtcaaaaagctcggagacggcgcgctcaataaaattctgacggatgcgtcggtgctttacgatgtgccgaaaatgtcgaaaaagaaagcggataagcttgccggagagctgcagcggcatcaggggcttgagcagattatgatctctctgaaccaatacggtttcgggccccagctatcaatgaaaatatatcaggcctacgaaacggaaaccctggagaaaattcaggaaaatccttatcagcttgtaaaagacgttgaaggcatcggctttgtgaaagctgacgagctgggcggaaaaatgggtctgtcaggaaaccacccggagcggatcaaagcggcaatcttatatacgattgaatcgacctgtctttcagaaggccatacgtacatagagacaaagcagctgattatcaatacgcaaacgctcctgaatcagtcagctgaaggcggccgcgtcacggaaatggatgcggctgacggcatcatcgccctcggggagagtaaggatatcgtcattgaaggagagcgctgctattttccgtccttgttttacgccgaacaaaatgtcgcaaaacgcgtgctcgacattgcggctcagacggagtatgccgatcaatttcctgaatcggaatttctgcttgcactcggtgaactggaagaacggatgaatgttcaatacgcaccaagccaaaaggatgccattcaaaaagcgctgtcttcaccgatgcttttactgaccggaggacctgggacggggaaaacgaccgttattaaaggaatcgtggaattatacagtgaactgcacggagtatcgcttgaccccggtgattataaaaaagacgaggcgtttccggtgctgcttgccgcgccgacgggaagagccgcaaaacggatgagcgaatctacgggtctgccggctgttacgattcacaggctgctcggctggaatggcgctgaaggctttacctacaatgaagatcagccgattgaagggaaactgatcattatagacgaagcgagcatgctcgatatctggctcgccagccatttgtttaaggcgcttcctaagcacattcagctcattgtcgtcggtgatgaagaccagcttccttcagtaggaccggggcaggtgctcagagaccttttagcttctgaggtgctgccgaccgtgcgcctgacagatatttaccgtcaggctgaaggatcatccattgtggaacttgcgcatgatatgaaaaaaggactgcttccaaaggggctgaccgcgccgacaaaggaccgctcatttatccgctgtaattcttcacagattaaagaagtcgtggatcaggtcgtctcgaacgctttaaaaaaggggtatacctccagggatattcaagtgcttgccccgatgtacaggggaaaagcgggaattaacgagctgaatatgcttcttcaagacatcatgaatccgccgaaagaaaaaaggcgggagctgaaattcggtgatgtcgtctacaggacgggcgataaaatattacagcttgtcaaccagccggaaaacaatgtgtttaacggcgatatcggcgaaatcgtgtccattttttatgccaaagaaaatacggaaaaagaagacatggtcgtcgtctcgtttgacggcaatgaaatcacctttacgaaaaaggatttcagccagtttacccacgcttactgctgttccattcataagtcgcagggaagcgaattcccgattgtcgtcctgcctgtcgtcaaaggctactatcgaatgctcaggagaaatctgctttataccgccataacaagagcgaaaaaatttctgattctttgcggagaagaagaagcgcttgaatggggcgtcaaaaacaatgatgccactgtcagacagacgtcgcttaaaaacaggctcacagagcagactgaagagatggatgcagaactggctgccctgcaaaaagagctgccgttcagtgtatatgatgcaaacatcggaatggaaggcatcacgccgtttgactttatggaagaaaaagcgtaaaaaaacccggagcataaacatgcgccgggttttcgcctgtggaagtcatttcaaagtatgctgcccggcttcttggcaaaacctatacgtgttcaacaaaaggtggttgatcacactttgagaacatgccatgcaactgaaggacgaacagtatatgacgaaaacgggcgcagtctcgggatgatatcggatgtatgtttctctctggacggccggtttctcggtttcgtgttggagcagaaacgcctgtttcacaaccgccatctttttttagaggcaagtgatataaaagagatggaacaagaagccgtagctgccggtcatgctcatttgcagcctttgccgaagagctgtttcacctttgaacagattaagatgcagccggtgaaatcgcccgatggtgaaatgttcggtttgctggaagatgtatacttttgtttggacaagggcataatcgtagcatatgaactctcggacggcttcttttcagatctggctggcagacgccaagtgcgccgcgccgccgatacgcttattgaagcggggaaagaaggcatcgtcctgaacggataagaggtgtagtctgtgcttgtatgtccgaactgcaaaagtaaagatatcggcaaaatcggcgtaaaccaatactattgctggggctgcttcattgagctgacggtggccaaaggcaaaattgcgacacatcaagtagaggaagacggcacattaagcagtcttgatgatttgttttctgaagacgaacgcagtatcaatttttaaagttgaaaggagatacgcgcgatgggcagaacaatgacctctctgttggctttaggagctggagccgttatgtatcgtatggcttctcagtccgatatgctgaataaaaaaggtatgaaacggatgagaagacgagtcatgaaaatgttttaagcagaaaaaaggatacttctccggaagtatcctttttacgtttgtctcgcttccagccgtctggctgcgagagacaggctgtaattgaccgcgaaatacatcagggccgccagcagaaagatcgggaaaaaatatcccccgtcagcgctttgtccgtttaaaatctgcgcgttatgaatcagttcgggcagagcgatgacgaccgcaagtgacgtatcctttaataaggagataaactggctcacaatcggaggaaccatacgcctgagcgcctgcggcatgacgacgagaaaaagagtctgcgtgtacgtcagtcctgaagaacgcgccgcttcaatctgtcctttgtcaacggattgcaaaccgcttctgatgatttctgacagcatggccgattcaaaaatcgtaagcgccgtgatggcggccgcggtaatttccagtttgatcccgatttccggaagggcaaaaaacgtaaagaaaatgattaataacagcggcaggttgcggatggtttccacaatggccgctataatgcccgagacgataggaattttcgcatagcgcaaagtgccggcggcaagcccgaaaataaaactcaggacaatggagatcagcgcaacataaagtgtgaccaaaaagccgtcccataaaaacagcagatggtcaggtgtataggcgccgctaaaatccatgtttttcactctccttctctaataactctttccgagacgtctttccaaatagtgaaccccgatgctgagcgggatcgttaatatcaaataaaaaagtgcgacgaaaatatagacatcaaacacgacaagagtgcttgaggaaacgagatccgcctgatacatcaaatcgaggcccgccaccactccgagtattgatgagtttttgacaaggttgagaaattggtttccgagcgggggaatcacgatttttacggcctgaggaagaatgacgtatctcatcgcctgactgtaggtgaagcctgacgatctggccgcttccatctgccctttggagacagtctgaattccggctctgatggcttctgcgataaaggcggacgtgtaaatcgtaagcgcaatcgttcccgcctgaaagccgtccagtctcagcccggcgttcggaagtccgaaataaaaaacgaatgtgatgaggagaagcgggatgttccggataaattccacatacgcagtgccgatccattgaaggggtttgaaagccgtgattctcatgactgcgatcagaacgcccagcgcaaaactgcctgccagcgcgatgaagctcgcaagcaatgtgtgcaggaaaccgtccatatacatatcgaagttttccgttaaaattgaaaagttcatctatgtcactccttataaaacggggatgagcatggctgctcatcccgcggtcctttctattttgccggttcttctttaatccattttttatagattttttcgtacctgccgtcggctttcatttttttcaaagaggcgttgatttccttgatgagtccggattggccttttttgacggcgattccgtaaggttcatcggtgaaggtttcgcctgtcagctgatattgtttattttcatctgccatgccgtataaaatagcattatcggttgtgagcgcatctccctgtcccgcttttagcgcagtgaacgcttcggcgtaattttcaaattccagcactgaggcgtcaggcgctttttctctgatgttttgtgaggaagtagagccttttaccgccaatacttttgagccttttcccaggtcttcggtgcttttgatgctgcttccttttttgacgagcagggattgcccggcttcaaaataaacatctgagaaatcaacttcttttttccgctcatccgttatcgtcatcgtggcggtgatggcatcgatatcgccgttttgcagcatcggaattctcgtttttgacgtcacttctttaaattccgctttcttctcatcccccagaatatcttttgcgagctgttttgagatatcaatatcgaagccttcaatatcaccggagcttgggtttttcagcccgaataacctcgtgtcggttttgacgccgaagatgattttgtctctgtctttaatagaggctaacgtgtcttttcccgttccttttgaatccccggacgtttctttccctccgcaggctgccagcataaagacggccagcagtgatatcaatccgaatgacaaccattttgttacgcgtgacataagcgctcctccgtttcttttcagtgatttaaaatacggcttaagaataaacgcgccctctcttcacgggggctttcgtaaaattcagccggtgcagcttcttctaagatggctccgccgtcgataaacacgatgcggtccgccacttcttttgcgaatcccatttcatgtgtgacgactgccatggtcatgccttcctttgcgagtgttttcatgacatccagcacttccccgatcatttccggatcaagcgcggatgtgggttcatcaaacagcataatttcgggcttcatcgcaagccccctggcgatggcgacacgctgctgctggccgcccgaaagctgtgaaggataagcgtccgctttttccggtataccgacttttttcaaatagtataaggccgtttcttttgcttcttcttttgattgcttaagcactttgatcggtgcgagcatgatgttttgcagaacggttttgtgcgggtacagatgaaaatgctgaaacaccatgccgatattgcggcggacctgatttatatccgttttcttgtcatggatggagacgccgtttaccgttaaggcgcctccatcaactgtttccagctgattaatgcagcggagaagcgtgctttttcccgatcctgaaggtccgatgataacgacgacttccccttttttaatgtgcagattaatgtttttcagcacgtggaaatgtccgtagtgcttatttacatcctgaaatgaaatcatggccatcctccttaaaaaacatgagtcatattgactggacagtttttgaaatcctttaacacattacgatggttatacagatttttatgaatattatttagattatttcgtaatttctgataattatttccgtcaagaggtctgcgtcataaggcggagtttatgaaacgggaataattccggctttctgtcaaaagataaagcaagaggtgaaacgtcatgcttcaaaaaccgctgcagctcttaatgtggacggctgtatgtctgctcgttttgttaacagtgtatgtcttttgcatgctcgatatgttatggtctcccatttggcttgttataaaatctctctttattcctatattcatcgcagtatttattgcttatcttttacttccgattactgaatggcttcatagaaaagggatgcctagaactttaagcctgcttctgatttattgcctgtttttcggcggaatcggctggggggtttataaaggggttcctgttttaattgaacagctgcaggatctgtctgagagcattcccggtcttgccaaaaactacaacagtatgctgaagcatctgcataatcacacggatcattggcctgacggtatgcaccatcggatggacaaaatgattcagcagacagaaacgtttcttgccggcacgattgaaagcacgatcagaagcatccgtttcgtgcttgattatatcctgatcgcggcgacgattccttttctcgtgttctatatggtgaaggatatagacgtcatgaaaaagacagtctggtatttgacgccgaagtcctggagaaaaagggggagtgaatttctgcgggatgtggacgactctctcggtgattacatccgcggtcagcttctcgtttgttttttgctcgggctaatagccggcgtttcattttggctgttcgggcttccttacccgctgattttgggtcttgccatcgggattacgaatgtcatcccgtatttcggtccgtttatcggcgctgtaccggcgctgctcctttcgctggcgatttctgctaaagctgtgatcatcgtaatcgtcaccatttttattctgcaatttatagaaggaaacattttgagtccgctcattgtcgggagaagtctcagaatgcaccccgtcgtgatcatgctggcgctccttgccggaggagagctcgctggcattcccggcatgattctcgctgtaccggcggcagccgttttaaaagtgacggccatacactttttgcggatcaggacggaacattgacattcgggttctgcttgtctataatttcgagtagaatacatacgaatctcgagtgacggatatgagtacgccgaagccctgtttaagagagaagctccgatacgctgaaaggagcttcagcagaagatcggcggaagctaatcctgagtgcagttaaaggctgccgcagtcctgcgttacgggatgaaaggtgacaggcctttttcggcctgtaatcagggtggtaccgcgagacagctctcgtccctgtgtgaacgcatggtttgcatagggagagagcttttttgctgtcgcaaaagagaatttcgggtagtgataaggaggaatatagatgaaacacttaacttctgctgaagtgcgtcaaatgtttttagatttctttaaagaaaaaggccatgccgttgaaccgagcgcctcattggttccgcatgaagatccgtctttattatggatcaacagcggcgttgcgacgctgaaaaaatactttgacggccgtgttgtgccggagaatccgagaattgtaaacgcgcaaaaatcaatccgtacaaatgatattgaaaatgtggggaaaacggcgcgccaccacacgttctttgagatgctcggaaacttttccatcggtgattattttaaagaagaagccatcacgtgggcatgggagtttttaacgagcgaaaagtggatcggctttgatccggagctgctgtctgtaacggttcaccctgaggatgaagaagcttatacactatgggcggaaaaaatcggcgttccggaagaaagaatcattcgtctggaagggaacttctgggatatcggtgaaggcccgagcggaccgaatacggaaattttctatgaccgcggcgagaaatacggcaatgacccgtcagattctgaattgtatccgggcggcgaaaatgatcgttatcttgaagtatggaacctggtattctcagagttcaaccacaacccggacggcacgtacacaccgcttccgaagaaaaacattgatacgggtatggggcttgagcggatggtctccgtgattcaggacgtcccgacaaactttgacactgatttgtttatgccgattattgaagcaacagagcgcatttccggagatgcttacggaaaggatgcagtgaaggatacggcctttaaagtgatcgccgatcatatcagaacggtcgcatttgcggtaagcgacggagctctgccgtcaaatgaagggcgcgggtatgtactgagacgcctcttgcgccgggcagtgcgatacgcgaaaaccatcgggatcagccgtccgtttatgtacgagctggtaccgactgttgcaggaattatggacgctttctatccggaggtgaaagaaaagcaagagtttatcgccaaagtcatcaaaacggaggaagagcgcttccacgaaacattaaacgaaggtctggccattttatccgacgtgataaagaaagagaaggaaaaaggcagcggcatcatctccggaaaagacgtattcaaactgtacgatacgtacggattcccggttgaattaacggaggaatacgcggaagatgagcaaatgaaagttgaccataaaggctttgaagccgaaatggaaaaacagcgtgaacgggcgagaaatgcgcgccaagatgtaggaagcatgcaggttcagggcggggcattgcgcgacattaccgcagaaagcacatttgtcggctacagtgccgtaaaagctgaagcgaaggtgatcgagctccttcatgacgggcaattaatcagtgaggcgcatgaaggggataccgtccaaatccttcttgacaaaacgcctttctatgctgaaagcggcggacagatcggtgacagaggagtgctgagaagcgagcaggctgtcgtaaccattaaagacgtgaaaaaagctccgaacggtcagcatgtacacgaaggcacggtggatagcggcacgattcaaaaaggcgcaagcgtgacggctgaagttgaagatcaaatgagaagcggcgtggtgaaaaaccatacggcaacccatcttctgcaccaggcgctgaaagacgttctcggcacacatgtcaaccaagcgggttcactcgttaccgaaaatcgcctgcgttttgacttctctcatttcggtcaagtgacgaaagaagaacttgaacgcattgaaggaatcgtcaacgaaaaaatctgggagagcattccggtagcgattgatttaaaaccgatcaatgaggcaaaagaaatgggcgcgatggccctgttcggcgagaaatacggcgatatcgtccgcgtcgtacaagtcggagattacagccttgagctttgcggcggatgccatgtcacgaatacggcagaaatcggtctgtttaaaatcgtatccgaatcagggatcggcgcagggacgcgaagaattgaagccgtaacaggaaaaggcgcttatcaggaaatgaacagccagctcagccttctgcagcacgctgcggacgagctgaaatcaaacgtaaaagatgtaccgaagcgaattcagtctcttcaagcagagctgaaggaagcgcaaagagaaaatgaatcattgctcagcaaactcggcaatgtggaagccggagccattctgtctaaagtaaaagacatcggcggcgtaaaagtgctggctgaaaaagtaaatgcgaaagacatgaaccaccttcgcactatggtggatgatctgaaagcgaagctcggttctgcggtcatcattctcggcgccgtgcaaaacgagaaagtcaacctttcagcaggcgtgacgcaagacctgatcgaaaaaggccttcacgccggcaaaatggtcaaacaagcggctgaagtctgcggaggcggaggcggaggccgtccggacatggcgcaggccggcggaaagcagcctgaaaaattggaagaggcgctggcatctgcggaagattggataaaatccgttttataatcctttcaactagtgtagaatgatgataagatgaggacctcaggctgaactttgcctgcgaatttgggaaagaggtgcaaaacggtgagctcgtttgataaaacgatgaaatttaatttctccgatgattctgctgaaacaaacgtcgaagaagtgctgaatacggtatatgatgcgcttcaggaaaaggggtacaatcctatcaaccagattgtcggatacttgctgtctggagatcctgcatacattcctaggcatcgcgacgcccggaacttaattcgcaaactggaacgtgacgaattaattgaggaattggtaaaatcctatctagaacagcataaagaggcgtaaatacattcatgagaatattgggacttgatcttggaacgaaaacactcggcgtagctttaagcgatgaaatgggctggaccgctcagggcattgagacgataaaaataaacgaggctgaaggagattacggtctggaccgtttatccgagctgatgaaagactataatgtagagaagatcgtgctcggttttccgaaaaacatgaacgggacgatcggtccgagaggcgaagccagccaaacatttgcgaaactgcttgaaacagcgtacaatgtccctgttgtgctgtgggacgagcgtctgacgacgatggcggctgaaaaaatgctgatcgcggctgacgtcagcaggcaaaaacgaaaaaaagtcattgataaaatggcggctgtcatgatccttcaaggatatctggacagtttaaactaagaggtgaaaagaaatggaacacggcgaaaaacacattacaattgtcgatgatcaaggcaacgaacagctttgcgaagtactgttcacatttgaaaacgacacattcaacaaatcttacgtactttattatccgattgatgctcaagacgatgatgaaatcgaaattcacgcttcaagtttcgaaccgaacgaaaacggtgaagacggcgaactgatgccgattgaaaccgatgaagagtgggaaatgatcgaagaaacgctgaacacgtttttagcggaagaagacgaagaataaaatgaacggaaaaagccggagcgcatatgcgcttcggcttttttttgtaataaattgccgaatgcacatgaatcatgtagtataagagctgttgggaggaaaatacttgtatgaatatcaatcagactaaaaattcatttccgcgtaaaaacaaaaaaacgacgataatactgtcctccgtgatcgctctgcttatcatcatttgcggtgcttttttctatgggaaatctctgctgtccccggttgacaaaggcagcaaaacggcagtcaatattaatattccgagcggttcttccgtttcggcaatcgctgaaaatcttgaggatcagcatgtcatcaaaagcaaaaaagcatttcagctgtatgtgaagtataaaggcgcttccgggtttcaggcgggattttaccatctgaataaaggaatggatgcggatgcgattatcaaaaaactgaccgcgggatcaacgggatatgcctttcagatttccgttcctgaaggaaaacagcttacgcagattgcggatgcgatcgcaaaagaaacatcatattcaaaagaagagatcatggcgaaactggatgacaaaacattcatcggcaaactgaaaaaacagtttcctgatacgataacggaggcgctttcaaacaagaagctcaagcatccgctcgaaggctatctgtatccggccacctatccgtttaatgatccggatgcatcgcttgacacgattttgacggcaatggttcaggaaacaaacacccgtatcgaaacgtataaatctgaactggaaaaaaagaaactttccgtccataacgcgctgacaatggcatcacttattgaagaagaagccaccgccaaagccgaccgtcacaaaatcgccagcgttttttacaacaggctcgaagaaaaaatgccgctgcagactgacccgacggtattatatgcggccggtaagcataaaagccgggtctactacaaagacctgaaaattgattctccgtttaatacgtataaacataagggactgccgccgggaccgattgcaaatgccggtgattcatcatgggaagcggctctccgccctgacaaaacagattatctttatttccttgcaaaatcaaacggcgaggtcgttttcaccaaaacattaaaagaccataataaagcgaaggaaaagtatatttccaaaaaagacagcgaataaaaggagggcaaaagctctccttttattccattctgaaaggttttatgataaaatatatcgggttgtttacttatggatatagaagtgtcttaagagagtgtccccgcggattcgtcaggggcactcctttttagaacggaggctgtttgccgtgaatgatcggtatgaacaaataaacgagtatataaacgcgatgctgaagcctcggcctgataaagtgaaaaagcttgaagcctatgcaaaagagcaccatgttccgattatggaagaagcgggcattgaagtgctgcttcaaatgctgtcgattcaacaggcgaaaaacattttggaaatcggcgcggcaatcggatattccgccatacggatggcgcttgagcttccggatgcgaatatttacacgattgaacgggacgacaaacgctatgaagaagctgtgaacaatataaaggactttgaaatggaaaaccggattcacgtaatgcacggggatgcgctggaactttctgagtctgtccgtgtcacggctccttatgatgccatttttatcgacgcggccaaaggccagtacacgaacttttttgagctctatgaaccgatgcttgcgccggatggagtcatttttacggacaatgttctgtttaaagggctggtggcacaaaatcactcggacattgagccgaaaagaagacggaagcttgttgaaaaaattgatcaatataaccaatggctgatggaccggcctgactatcaaacggtcatactgccggtcggagacggcatcgccatcagtaaaaagaagaggtgaaggatcatgaaaaaacctgaacttttggtgactccgacttctgtacaggatattcttccgctcattcaagcgggcgcaacggccctgttagtcggagaacagagatacggcctgagactggccggtgaattttcaagagaagatataaaagaagccgtaaagacagctcatcaggaaggcgcgaaagtgtacgccgccgtcaatgctatttttcacaacgaaaaagtggacgagctgaacggctatcttgcctttttgcaggaggccggcgttgatgcggctgttttcggtgatccggccgttttaatggcggcgcgtgaagcggctcccgagcttaaactgcactggagcacggaaacaacgggaaccaactactattcctgcaattactggggacgcaaaggcgcacggcgggcagtactggctaaggaattaaatatggacagcatcattgacataaaagaaaacgctgaagtggaaattgaaattcaaatccacggcatgacgtgcatgttccaatcgaagcgttctttagtgggccattacttcgaataccagggtaaagtcatggacatcgaacagaagaaaaaagaagcggggatgtttctgcatgacaaggaacggggcaataaatacccgatttttgaagatgaaaacggcacgcacatcatgagcccgaacgatgtgtgcatgattgatgaattagaggacctgatggacgccggcatcgattctttcaaaatcgacggagttttaaagtctcctgaatacttaactgaagtgacccgcatgtacagagaagcaatcgatttgtgcttcgaaagccgagagacatacgaagagaaaaaagagagctggatagagcggattgaaagcattcagcctgtgaacagaagcatcgacacaggattcttctttaaagaaacggtctattaaaaaggaggatgcaacggatgacagccgtaaatcaaaccatttccaaagtcgtaaacggaaaacgcgtcattacgaaaaaacctgaactccttgctccggcaggaaaccttgaaaaattaaaaattgccgttcattacggagcggacgcggtttttatcggaggacaggaatacggactccgctcaaatgcggataacttctcaatagaagaaatcgcagagggcgtagaatttgccaaaaaatacggggcgaaaatatatgtgacaacaaacattttcgcccataatgaaaatatggacggtctggaagaatacttaaaagcgttgggagacgcaaaagttgccggaattatcgtcgctgatccgctgattattgaaacatgccggagagtggccccggacgtagaaattcacctcagcacacagcagtccctttccaactggaaagcggtgcagttctggaaagaagaagggcttgaccgcgtggtgcttgcccgtgaaacgagcggactggaaattaaagaaatgaaggaaaaggtggatattgaaattgaaacctttatccacggcgccatgtgtatcgcttattcaggccgatgcgtgctgagcaatcacatgacagcccgggattccaaccgcggcggctgctgtcagtcctgccgctgggattatgacctgtatcagacagacggtgcaaacgcggtcgcgctctatggcgaagaagacgctccgtttgcgatgagcccgaaagatttaaaattgattgaatccattccgcaaatgatcgagatgggcatcgacagcctgaaaattgaaggccggatgaaatcaattcattacgttgcgacggttgtcagcgtgtatcgcaaagtcatcgacgcatactgcgctgatcctgagaactttgtcattcaaaaagaatggctggatgagctggacaaatgtgcaaaccgggataccgcgcctgctttctttgaaggcacgcccgggtatgaagagcagatgttcggtgaacacggaaagaaaacaacatttgattttgccggtctcgtgctcgcgtataacgaggaaactcaaatggtgacgctccagcagcgcaatttctttaaacaaggtgacgaagtggaatttttcggtcctgaaatcgacaatttcacatttacaatcggcactatttgggacgaagacggaaacgagcttgatgctgcccgccatcccctgcaaatcgttacatttaaagtagacaaaaagatttatccgagcaacatgatgagaaaggggaagtaatcaccaatgggtaagagtcctgtagttataggcatcgcaggaggttccggatcaggaaaaacaagcgtcacccgttccatctatgaacagtttaaaggacactcgattttaatgatccagcaagacctttattataaagaccaaagtcatcttccgtttgaagaaaggctgaacacaaactatgatcacccgctcgcatttgataatgactatttaatcgagcatattcaagagcttttgaattaccggccgatagaaaagccgatttatgattataaactgcatacgcgatctgaggaaaccattccggttgagccgaaggatgtcattattctggaaggcattctcgttctcgaagataaaaggcttcgcgacctcatggatatgaaactttatgttgacacggacgcggatctccgtatcatcagacggattatgagagatattaacgaaagaggccgttcaatcgattctgtcattgagcagtatgtgtccgtcgtcagaccgatgcacaatcagtttgttgaaccgacgaaacgctacgcggacatcattattccggaaggcggacaaaaccacgtcgcgattgatctgatggtcacgaagattcaaacgatccttgaacaaaatgcaattttgtaataccatagcatagacataaataactcagaccatattatgtataggctggaagggaatgagacagttcccttctttccctgtttataaaccgaaacatttgcagaaaacacatattcagtttaagataaacagtacctatatgggagagaagaacgaggactgccctgtgttctcattcttgattttttcgtttatgctctcatacataatcacacgttattgttgagggacaaccaccaaggagtgaaggaacatggcacaagaaaaagtttttccgatgactcacgaaggaaaacaaaaacttgaacaagaattagagcaattgaaaacggttaaacgtaaagaagtagtagaacgcattaaaatcgcaagaagcttcggagatctgtcagagaactctgagtatgattctgcaaaagaagaacaggcatttgtggaagggcgcatcacgacgcttgaaaacatgatccgcaatgcgaaaatcatcgaggacgacggcggttcaaatgtagtcggtttgggaaaaactgtatcatttatcgaattgccggacggtgaagaagaatcttacacgattgtcggaagcgctgaagctgatccgtttgaagggaaaatttcaaacgactcgccaatcgccaaaagcctgctcggcagaaaagtggacgaagaagtgacagttcagacgccgggcggagaaatgctcgtgaaaattgtgaaaatttcataagatccgtttaacaatgaaacacctcgtccaaaatgtggatgaggtgtttttttatgatcgtatcaaaaaggctgaaagcggccgtgatttgttttctgctcgtgtttttctttctgcttgcgaggctggctgaaattcagctgtttttcacagaatctttttcaaaatccaatattaatctgattcaggaaagcgtcaagcagcggacggaagaagtccttatttcagacggacgcggctcttttcttgatcggaacggcaaagaactgaccggaaaaaagcagcctgccgtcatactgtttccctttctcgtgacgcaggattggccggttgaccgggtatcagacattctcggaatgaaacagggggagctcaggcagctgctcacggaagcaaaaaaaccggtgatcctgaacagcagaaaaataaaacatttgacgaaacaatccgtgtcaaatatcaattctttgaaatatcccggcatttacggcgtatatatgaaagacagcaaagaaacaaacatagccgctcatttgtttggcgcgacaaaccaggaccctgagcttttgaaaaagaaataccccggcaggaaggaactgccgatcacggcaaaaatcgggacaagcggaatggagcggacgtttgatgagtttttacttgcggatcaggacacaaaacttttgtatcatgtcgacggaaggggaaaccctttattcggaatggacgtcaaatatacggctgaagcaaacgcgttttatccgctgcaagtcaaaacctccatcgaccgcaatattcaaaaagcaatggaagatgtattgaaagaccgcgggttaaaaaaggggggagccgtccttttagacattgaaaaaagcagtgtgctcggaatggtctctaagcctgacgccgacatgtcaaagcagcagacattgcaaaattacatgctgacgccgatttatccgggatcagtatttaaaacggtgatcgccgcagccgcaatagaacaaaacgaagtgaagccgggcacatcctttaactgcaatctcaacctgtacggagagccgggggatgacaaaggcacgctcagttttggagaaagctttgcccaaagctgcaattatacgtttacaagtcttgcggaaaaattgatcaaaaaggatgattccgttattgaaaacatggcggaaaaactcggtctcacccagcgggcgggctgggaaggcaagctgtaccgggaagaccgattcaggcagctgtataatgaaaaaagcggggtcatttggggagatgacaaagacaaaaccgtaaaaaaagccgtcgcacagacggcgatcgggcaaaaaaacgtgaaagtcacgcctcttgaagtcgccaatatgatggcggcgatcgcgcgcggcggtgaaaaaaaacaagtcaaaatcgcggacaaaattgaatacaaaaacaaaacgacgatggcgtcattcaaagatcagccgttaaaaggggaaaacatcgacaaatatacggcgcagcagcttcaaaaaattctcagagaagtcgtcacctcaccgaaaggaaccggccgaaggtttcaggatctgccgtatgagatagcaggcaaatcgggaacggcccagacgggaatgttcacaaaagaaaaacagacgctttaccacaaatggtttgcgggatactttcccgcggacaagccgaaatacgctctcgtggtgctgcacatggacacgccgggggataaggctctgacaaatacagtgttttatgatattgttaaaaaggtacatgaaaatgaaataaatcagacatagaacaaccgctcagcccatgttaaaatatatgctgagcaagagggataaaggagtgcagaatgattgagcaataaacaatctcgttttgaaaaccgtgataagcgcagaaaagcaaatatggtgcttaacattttaattgctatcgtatctattcttattgtcgtcgttgccgtcagcctcttcatcaacagtccgtcgggcgacgtgagcgaaaaagcggacacgagccagaagcaggaaacacctgcatcaggcaagacgaagcagacatcggatgaagacataaaagacagcaaaaaagatacggcatcagacgatgacaaaaaagataaacaggataaggacacatctgattcatcttcagactctgacagcaaaaaagacgatgattcatcgaaaagtgatgacagcagcaaaaaagactctgattcaagcgatccttttaaaggcgcaaaaataacagagggcggttcatcaagcgatgtcgagaaaacaattgttaacccaaaatggaaagcggtcggcacaaagcagacgggagaacatgcggcgacgtatgactcaagctctgaagactgggccgaaatgcttgacgccatctcttacgcaaccggcgtgtcaaaagatcacatgacagtgctgtggctcggaaacaatggaagtccgcaagatgcgaagggtaaagttttagacaaaacgaacggcaaaaagtatcaggtcaccatcacttggaaagacaaaaaaggctggaagccgacaaaagtagaaaccttaaaataaccgcaaaaaagcagctgattattcagctgcttttttctgtcatacgtcagctgaaaaatgcaccgacgcgctgtaaaggattctgccgtcaacgaccgtcacctgatgggatacggaacggacgcgaagcataatcgcctggttgttttcaatctgaacgtttattttcttttcaagctcctgcaaagatgccgcttcgaaaaattctactttatctttgattaaatccaattgaaaattcatcagtacagatcctcctgatttttcttctgagtcaatgaaagtataagcctttctgccgtaattgcgcaataatcccaaagtattttagtacccttccattcttttttgtgataggataggaactgttccacgattaatccatactatactcataggaattataaaatatggagagtgaaaaatatgggccgtgaatttattcctttatttgaagattgggcagcgacttatgacgccacagtgcacggggctgacagacaatatgctgctgtttttaaaggatatgacaatattcttgacagcattgtcgcactttcaggttcaaacgttttagagttcggaccgggaacggggaatttaacggcgaaattagccgccgcgaacaaaaaggtgtttggtgtagaaccgtctccgtcaatgagaaaactggcggctgacaagctttctgacaaagccgtgttcagtgacggagattttctggagtttcccgctccgccttttcaaatagatactatcgtcagctcgtacgcctttcatcatttaaccgatgaagaaaagcgaacggctgtaaagcagtatggcgcaatccttcagaagcatgataaaatagtgtttgccgatactgtctttaaagatcatgaagcttatgatgaagccattcaaaaagcaagccgaaagggctatcatcaattagcggacgatttaaagacggaacattatccgacactcgcgacaatgaaaaacatcttttcagaagagggatttgccgcgcggtttacgcagcaaaatgactttgtctggataatggaggcgattaaacggtaaatcgaagggattgtgtataaatgaaactggcagtcatcggagcaatggaagaggaagttacgattttaagaagcaaactgaaagacgcaaaacaagagatgatcgctcactgtgagtttacaactggcagctatgaaggcatcgaagtcatcttgctgaaatcaggtatcgggaaagtcaacgcggcgatcagcacgacgcttctgcttgaccgtttcaaacctgattatgtgattaacacaggctcagcgggcggttttcatcatacattgaatgtaggcgacgtcgtcatctcaacagatgtccgccatcatgacgtggatgtgacggcgtttgactatgaatacggacaggtgccgggtcttccggcagcatacaaagctgatgaaaagctgatcagcattactgaggaagcggtttctgaactgaacggcattcaagtcgccaaaggcacaatcgctacgggagattcttttatgaatgatccgaagcgggttgaagacgtacgcgccaaatttgcggatttgtacgcggttgagatggaagctgcggctgtcgcacaggtgtgccaccagttcaaaacgccttttgttgtcatcagagctttatctgatattgccggaaaagaatctgacgtttcatttgataaatttttagaacaggctgccgttcattcaactgagcttgtcctgaatgtcatcaaacgaattcactaagcgggggattctcgttctcctccgcttttccaggaggaggacatatattgaacgtgataacagatattacagaactgatcggaaatacaccgctgctccgtctcaagcattttgatataccggagggaacagcggtttatgctaagcttgaaatgatgaatccgggcggaagcattaaagacaggctgggcgggatgctcattgaagatgcgcttcgcatgggaaaggtgaaaccgggcggcgttatcattgaggcgactgccggaaacaccgggatcggactcgctctgtgcgccagaaagcatcagcttcgcgccgttttttgcgtcccggagcatttcagcagagaaaagcagcaaattatgaaagctctcggagcggacatcgtgcatacgccgagagaagaaggcatgcagggagccattcgaaaagcgcttgaactggagagagagattaataattcttatgccgttctgcaatttaaaaaccgagtaaatccattgacttactataaaacgatcggacccgaaatatggaacgcgctcggcggggatatccacgcttttgtcgcaggagcgggttccggcggcacctttgccggtacggcagcttatttaaaagagaaaaatcctgccgtcaaaacggtgatcgttgaaccggaaggctcgatcctgaatggcggagagccgcatgcccataaaacggaaggcatcggcatggagtttatcccggattatatggacgagaaccattttgacgccatttacacggtggaagacgatacggcgttttcgcttgtcagagaagcggccgagaaagaaggcctcttaatcggaagctcttcaggggcggctctttatgcagcgcttgaagaagcgaaaaaagcgcccgccggatcaaatatcgtcactattttccctgacggcagcgatcgatatataagcaaaaacatttttcaaggaggtcagtaagatgaagaaaaaaacgctgatggtgcacggaggaattacgggagatgaaaaaacaggagcggtttccgtaccgatttatcaagtaagcacgtaccagcagccgaaagcgggcgagcacacgggttatgaatattcaagaacggccaatccgacgcggacggcgcttgaaagcttaattgcggagcttgaaggcggcgcggcgggatatgcgttcggctcaggcatggctgcgattactgccgtcatgatgctgtttgacagcggcgatcatgttattttgacggatgatgtatacggcggtacttaccgggtgatgacaggcgtgctgaaccgcttcggcattgaagcggactttgttgatacgagcagtgaagaaaaagtcaaaaaggccattcgcccgaatacgaaagccatttatatcgaaacaccgacaaacccgctattgaaagtgactgacctcaaactgatgtctgacatcgcaaaagaagcgggcgtattgcttatcgtcgataatacgttttacacgccgtatttccagcagccgctcagcttcggcgcagacatcgtgctgcacagcgcgacaaaatatctcggcggccacagcgatgtcgtcggcggcttagtcgtcacggctgataaagagctcggtgaaaagcttcattacgtgcaaaactcaacaggcggcgttttaggaccgcaggattcatggctcttaatgagaggcattaaaacactgggactcagaatggatgccatcaatcacagcgccgggaaaatcgccgagctgcttgaagcgcatgatgccgttcaaacgctctattatccgggatcagcgaaacatccggaccatgagctgacaaaagcgcaaagctccggtttcggcggaatgatttcctttgatgtcggcagcagcgaacgcgtcgacgcgtttttagaaaaattgaacctgtttacgatcgcggaaagtttaggagcggttgaaagcttaatctccgtgccgtccagaatgacgcacgcttcgatcccgcgcgaccgccggcttgcgcttggcattaccgacgggctcgtgcggatctcagtcggtattgaggatactgaagatttaacggcggatgtgaaacaggcgcttgattcacttttataaagaatggatagatttacattctctgtcggctgtcagcttgtattataatgttggtagactataaaactggcaggtgaccttatatggagaagaaaagactgaaatcactactagaagattttaagcattacgcatttattctgcttgcagtcagcaccttcatttatatcggcgcggttcttcccggacaagggctgactgcgggccagaaaatgctgatgtttgtaacggattgtgtatttttagcgggcgcttatttctgcgttgaccgttcacttatttataaaaagaggctggaagaggccgatgaataaaaaaaagccattgtcttttgacaatggctttttcatttcttattcagacggggtttcgcgtaattcttttcccattccttttaaaaactgcagcccgaagccgagcgcgcggttaatatcaggatcaccgacggctttcatcagttcaaacatactgactttcctgtcctcttttaagaatctttgcgcctgatccgtcccggccatggcgctttctaaaagtctgcccataaattcgggatcagcttttgacagcgcgcctcccgcggccatcatcgtattcaggagattggtgacaggttcccgggaaatctgtccgagtgcgattttggcaatctcctcttttgcctggagcatatagccggcggcatcaaaaatgcccaagctattcagctctgccatgatggacatcgttttcgcgacggcttcttcattttctgcgagaagcgtcttcagctcttccagtttttcagctttcagctgttcctctgttttcgtttctttttgaatttcagtaattgggcttgccataatgtttcctcctttccttaatcagttaagtgcacatagcccggacggttccattttcgctgagcttccacaccgttttgcggatgacgttttttgttccgcggattcgttttcggaagcggcggagtatcacaggaaccgagcacttccatgcggacttttgtctgcttataggcaggtgtatgtgtccgtgaatcatacgcaggcccggtcaggaaattaatcgcagaatctttatctgtagagttcatcggcagataaagctcatttgcgcggacgcggtctgtcacaagcgcgttcaatttaaccgctccaaaaggagagacgagccggatcattgtcccgtcgcaaattccgcgttcagccgcgagctccggcgatacttcaacaaatacatccggaactttagactgaatgccttttgacttgtttgtcatgtttccttcgtggaaatgttcaagcatccgtccgttgttaatatgcaggtcatattcttcagggaatacagcaggctccacccaatcgctcagcgcaaaacgggcttttttgtccgggaagttaaagccgtcttcataaagaagcggagtgctttctcccgtaaagcttccccacaggaagctgttccagccgctaaggacgtcgtagcttgcttttccgaacagcggagaaaggctcgccatttctgagaaaatgtcgctaggatgcgtgtaattccaatcagcgcctaaacgattagcgacttcctgaataatccaccagtcgggttttgcatcgccgagtgtcggaagcgcctgatacaacctttgcacacgccgctctgtgtttgtaaatgttccgtctttttcaagagatggaaccgcaggcaggatgacatccgcgtattgcgccgttcttgaaaggaaaatatcctgcacaacaaagaaatcaaggctggataaaatgtcatgaacatggttggcgtttgaatcgacgagcgccatatcttcaccgacgagatacatggctttcatgtttccttcttcaatcgcatggagcatttcaatattatcaagacccggcttgccgtcaatttcaacaccgtaagctttttcgaatttagcgcgtgccgcatcatcggtaatatgctgatatcccggaagccagcctggaagagttcccatatcgcaagcgccttgaacgttgttatgtccccgcagcggataggctccggcgcccggacggcggtagtttcctgtggcaagcagcaggttggaaatcgccgctgatgtatcagagccgcctgtattctgggttacgcccatgccccaaagaacacaagtgccgtcagcatcacgaatcatttcggcaatacggatgatcgtatcctgagaaagtccggtgatgcgctccgcatattccaatgtgtatttttccagcgtttctttataatcatcaaagtagttgacattttcatcaataaacgcttgatcgtgccagccttggtcaatcatatatttcgttactgccatgagccagacctggtcagtcccttgtttcgggctgataaagaggtcggaccgttcagccatttcatttctgcgcagatcggcaacaatcagtttttggccgtgcagtttatgggcgcgtttcacgcgtgtggccagaaccggatgtccttccgccggattggcgccgacgatgagcacgaggcccgcttttgcgatatctttaattgtgccggcgtctccgcccataccgacggtgcggaataagccgtccgttgccggtgactggcagtagcgtgagcagttatccacgttgttggtttcaaatacttggcgcgccaatttttgaatgacatagttgtcttcattcgtaattttagaagaagaaataaagccgacagaaccatttccgtgttcggccttgatcgaaccgagtcttgaagcgacaagatcaagagcttcttcccatgacgattcaacaaatgcgccgtttttccggataagcggttttgtaatccgttcttccgaattcacgaagtcccagccgaatttccctttcacacaagtggaaatcgcgttaaccggagcatcggaaacaggctgaattttaaggatgtcacggccttttgtccatacttcaaaagagcatccgacgccgcagaacgtgcagactgtttttgtttttttcgtccgtttatcgcgcatagccgcttccacttcagacacggcgaagatgcttgtatagtcgggttcaacattttttactaaatcaatcatcggttccatgacatcttcttttattcctgtcataaatccggcttggccgagcattgatttttccatcagtgcgttacaaggacagacagtgacacactggccgcagctgacgcaggaagattcattaatggcgacgccttcatcccaaatgacccgcgggcggtcgcgctcccaatcaattgaaagggtctcattcacctgaaggttttgacacacttccacacattggccgcaggcgatgcattggttcggatcatagcggtaaaacgggtgagacatatcaaccgcgcactttgaatcatctttcggcgtatacggatatttctgatgctcaattcccatcatttccgctgtattatgcagtgtgcagttgccgttgttgttatcgcataccgtacagtaaagcaggtgattctcgagcaggcggtccatggcctctgtctgagcctcttttacccttcccgacgtaagcgagatggacatcccgttttctgcagccgtggaacaagagcgctgcaatttcccgtttacttcaacaatacaggtgtcacatgtttgaatcggatccacttccggtacatggcatatttgcggaatctcaattccgttttggtttaaaatatctaaaatcttagacccctctggtgcttcatactccgtgccgtcaattttgacacggatagactgaacgtctgtcacttccaattcccctccatcttgtaaactcgaaaaaaagccatgcacatagataccggcctcctgtccggagaacggtataaatacgcatggcggaatagttcactagcaagtcttactaacagaccaatcctatttgtataaaacgatagactcataacacgtttcctattacaaatccatcttcactgcttttattataaggtgatatttattataatacaatacgaaaggaaaactttaaccaggtgaaatgtcacaaaggggaaccgggaatgtctttcataggctaaaatcggaggggacaatatgtctaaaaaaattcatgaatttaacgatattatccggaaattgcgcaaagaattatttggaaaggggcctgaacgaattcacaccgtttttgtggataacatggcggtatctacactttacggaaatctaagcgcaagtgagcagtttatcgcacgcacgcctgaaggaagagaaatggttcatgcggcgcgaaccagcttaattcaggagctgtattcaaaacaaacgcctgacggaatggaagagctcatcggagcaaagcttgtgcatctgttttcagatattaaaatagaggaaaatattgccgtatcggtgtttgtctttgaccgctcaattgaagagcataaagaagaaatcaaaagctgacaatattcaattgacacgaaattgtcacatttgatatgatatgaactgccagcagtggcctaaggacgattttttatggaatgtgtgcatgatctgtacatattctataccgcatattttcattctgcttgatattgttgtatgggtatgcatacaagttaggcagcattcaaaccccgttttttcagacgggttagttgaatgctgccttttttgttaggcgtctttggaaactgcgggctgaaatgataaatggaggggttattatggcttttcgtaaaccggacgaaatagcggagcttgcggtcgaatcaggggtaaaaaaggtgcattcaccgctttcagcactgattgtattaggatttttgggaggagcgtttatcgcactcggttatttgcttgatatccgtgtcatcggcgaccttccgaaagaatggggaagcctgtcgagtttaatcggggcgtccgtgtttcccatcggattggtgctcgtcgttcttgccggcgcggagctgattacgggaaatatgatgtcggtatccatggcgctgttttccagaagaatatccgccggtgcattagtgaaaaattgggtgatcgtgacgttgatgaatcttgtcggcgcactgtttgtcgcttactttttcggacatgttgtcggattaaccgaaacaggaccgtatttggaaaaaacgattacggtcgcacaaggcaaattggatatgccgtttggaaaagtcattgtttcggcgatcggctgtaactggcttgtctgtttggccgtctggctttctttcggcgcagaagacggagccggaaaaatcgcgggtatatggtttccgattatggcgtttgtcgcaattggttttcagcacgttgtagccaatatgtttatcatcccggctgcgatttttgcaggttctttttcgtggggtgatctgattggcaatctcattccggcctttatcgggaatgtcatcggcggggcagtgtttgtcggccttatttattttattgcatattcaaaaaaagatcagaaaaagcaagggatgaaaagagtttcctgaggtaataaagatgccggaaaacacggacaattgaagcggaatgccagcacattttccgtccaaatcttgaaaaaaatgtttacaaaatggaagctgatggatatacttacaaagtaagaaaaaagcaaagggaggttgaatcacatgacgacgttaaacggcaatcaaaatctacaattgaaccgattcagcctgtggaagagttcgtgtccttccttaacctctgcccgtcaagcacgttaatttcggagtatcaggacattcgcagctccccgcagggaaagaagcaccgtcttcttttgtctgcggatttagtctgcccgcagcgcatatgaactttgctgcgggttattttcgcttgtgcggatattgaaagggggtgagcgataatgaccattaatcttttctttttaacactgaccatttcaaagcgttttaaaagtgcggaagagtatgaacgagaacagcaggtcgaagagttttataatgaagcgaaagaacgccagctgaaacatttttatatgaactaacggacacgaagggctaaaacggaggagaaggaggagatcatcatgttcagaattgaactgctgaatcattacacaatggagaaggaccaggtttagcgaggatgttgctgtcacgtcgcagacggcctgcataccatggtaaagaaagaaaaattggtaagcgggtgataacatgcaaggcggtcagaacagaattccatccatcgggcacgggtatgcgtcaatgccccattcatttaaacacggctacggcaacccgtaccgtcggcagagaatggcggcgctttcccggcagacaagatatatagcaccgtattattggtactagagcaggcggaaaacctacgttttccgtctttttttatgaaaacaaatataaatttcaaataaatcgaaacgttcatgaagagaagtgcgtctagttagtacctcatactaatacgaggtaatattatttctgaataataaatcacaggaatggaaaagcgggtgttatacaatgttgcaacatacatcttcagcattaaaacgaatgcgcgcgaaatactttgctgcatcagaaccggcagagtcagtcattcagcaaatcttgatggacatacaggaatacgaccgcattttggaaatcgggaccggaaacggctcaatgtttaaacaaatcatcggacagcttgaaaagggcagtcttaaaagcatagaaacatcgaaacgtaaaatacggaaaacacagcgcgcaaaccgttcggttataaaagccgggctcggaaacattcagcaggggaggccggaaagcataccgttccgcgaccgcagctttcataaagtcttctcattacatactgctgaaacagtcagcgattaccggacagcatgtaaagaagtgtaccgcgttcttcaaattgacgggtgtttctatatggttttgaaaccttcgcggatgagtgagaaggatgtgattgaggtgctctatgatcagcatttcagagacatttcagttgtcagcagagattcattccattttattactgccattaaatagaatatttcttgggaaataaaaagagctgcttaagtcactgcagctctttttgtgaaattgggcatatttccttatttttggttatttcacatatattttatattaaaaaaagtttttttcttatacaatggtaatcagatgaccgtacattttaaatattttgaacaaacggaatgaatattcattccgcatttagaaagggggatgaaatgacagcttcaaacaaggttgaactcattatgaaagcgtcgcttactttgtttacagatagaggatttgacgccacgacgattccgatgattgccgctcaggccgatgtcggaaccggcacaatttaccgttactttgacagtaaagagacacttgtgaacgtactgtatcaggaaagtgcgcagcgttttatgaaaaaagtcaaaacagactttcaggggatatctgtaagagaagggtttcatcacctgttttattgtctgattgattttacgaaggaaagtgagtatgcattgttttttcttgaaacgaataaggacgcctactttctgaatgaaacgagccgtaagcttcttgatgaaataacacagatgcttgacgtcttttttcagcgcggcaagtctgaaggcgtgctccgcaatctgccgtccaatgtgctgatggcgctgctgctcggggcatatctcaaactctatcagcttatccggacgggaagcgtcgaaataactaaaccgtttctgaaagagttggaacaatgttcttgggatgccatcagaactcattaattatacgccgaaggaaggaagatcgatatgaaacagctaagcgctataccgcagccgaaaacatacgggcctctgaaaaatctccctcacttggaaaaagaaaaactgtcacaatcgctttggaaaattgccgaagaatacggcccgatctttcgttttgaatttccaagctctgtcggggtcttcgtatcaggccgcgagctcgcggcagaagtctgtgatgaaaagcgatttgacaaaaatctcagcaaagccctgctgaaagtccgtgagtttggcggtgacggactatttacgagctggacaaacgaaaagaactggcagaaagcgcatcggattttattgccgagcttcagccagaaggcgatgaaaggctatcattcaatgatgctggatattgccatgcagctcgtgcagaagtggagcagattaaatccgaatgaagaaattgacgttgccgaagatatgacgcgcctgacgctggatacagtcggcctgtgcggatttcattaccgctttaacagcttttaccgcgacacacagcatccttttatcacaagtatgcttcgtgcgctgcaggaggcaatgcgccaatcgcagagacacagcctgcaggacaagctgatgatcaaaacgagacatcagttccagcaggatattgaagagatgaattcgcttgtagaccggatcatcgctgagcggagggaaaatccggatgagaatctgtctgaccttttagcattgatgcttgaagcgaaagaccctgtaacgggggaaaggctggatgatgaaaatatccgttatcaaatcattacctttttgatcgctgggcatgaaaccacaagcgggctgctttcttttgcgatatactgcctgctgaaaaataaagataaattgaaaaaagccgttcaggaagccgagcgggtgctgacgggagagacccctgaatataagcagattcagcagctgacatatatccgcatggtgttaaacgagactttgcggctgtatccgactgccccggcattttctctgtacgcgaaggaagatacggttctcggcgggaagtatccgattgagaagggacagccggtgacgattctgactccgcagctgcaccgggataaaagtgcgtggggagaagatgccgagtcattccgcccggaaaggttcagcgatcccgcggccattccggctgatgcgtataagccgttcggaaacggacagcgcgcatgcatcgggatgcagtttgccctgcaggaagcgacaatggtgctcggccttgtcctgaaacactttgaactgattgatcatactgattatgagcttacgattaaagaagctctaaccattaaacccggtgattttaaaatccgtgtgaaaaacaaggacgtgtccaatcatcagcccgtacaaaaccataaagctgaaggaagcggtcacaaagaagaaacgaaagaaatcccgtcccacggaacgccgcttctcattctttacggatcaaatttaggaactgcggaaggaatcgcggaagagctggctgatatcggaagaagcaaaggattttcaactgaaaccggcccgctcgatgattatgccgggaaactgcctgtaaaaggcgcggtcgttattgttacggcttcttataacggggcgccgcctgataatgcggcgggttttgtgaaatggatggaaacccttgaagatcaggaactaaagggtgtttcttacgccgttttcggctgcggagaccgcaactgggccgccacttaccagaggatcccccgcctgatagacaaagtgcttgaagaaaaaggggcaaaacggctgacctctatcggggagggcgacaatgccgatgattttgagtacagtcaggaagcctgggaagactcattctggaaggacatcatgaaggcttttcatatagaggccgctccaaaacagacaaacaaatcacagttatcaatcgaatacgtaagtgaagcagccgagacgccgattgccaaaacgtacaaagcatttgaggcggaagtcatcacaaacaaagagcttcataccgaaagcagcaagcgctcagtccggcatattgagctgcgtctccccgaaacagaaacgtatcaggaaggagatcatctcggggtgcttccgcaaaacagcggggaactgatcagccgtgtcattcgccgattcggtcttgatccgaaccagcactttaagatcaagggccggcagctgcctcatctgccgatggaccggccggttaatgcgccggagcttttggcgtcctatgtagagctgcaggagccggcaacgagagcccagcttcgcgaacttgccgcacataccgtgtgcccgccgcaccaaaaagaattggagcatctttattctgatgatgcggcatataaagaaaacgtgctgaaaaaacgaatgaccatgctggacctgctggaagattatcctgcatgtgaactgccgtttgagcgctttttagaacttctgccgtccttaaaggcgcgctattattcaatctcaagctcaccgaaggcagccagcggggagctcagtatcacggtcggcgttgtgacggctccggcatggagcggccgtggggaataccggggcgtggcttcgaactatttagccggattacaaaaaggcgatcctgccgtctgtttcatccgctcgccgcagtcgggtttcgcattgcctgaaaatccgaaaacgcctctcattatggtcggagcaggcacaggaattgcgccgttcaggggatttatccaggcgcgcgctgccgaaaaaatgtccggtaacagcctgggcgaagctcatttatacttcggctgccgacatcctgaagaagacgatctgtacaaagatgaattcgaccatgcggagaaaaacggccttgtcaccgtgcatcgggcgtattccagattggatcaggactgtaaagtatatgtacaggatgttctgcttcgcgaggctgaacaaattattgctcttcttgaccaaggcggccatctctatatatgcggtgacggaagcaaaatggctccggccgtggaaaatgtactgcttcaggcgtatgaaaaggtgcataacactgattcaaaagtttccttggagtggcttgaacagctgcaggcggaaggaagatatgcgaaagatgtttgggcaggtatgtaacagaagagtgagacaactgaagaatgttttttaattgaagaaagccggcacgatatttgaaatctactgaatcaaaaggaatagttatagggagtatcgtgccggtcttatctttagtatcggacaaaagacacaaatctttaatgtttttattgatttacatgcaggcggctatgtcctttttttctgaattccgccagaaataatatcggataagacagcaatagcaaaaccgaaataaatgaaatgataccgatccaatgaaaatgcgtccaaaagaaaccgccgcaagacccggccacgcttgaaccgatatagtatgcaagcagatataatgaagaggcttgcgcgcgatgatcaccggctgcccggccgacccaggcgcttgcgatcgaatgcgcgccgaaaaagccgaaggtaaagacggcaatccccgcgattttaagcgcaagctggggcaaaagtgtcaccgctgcgccggcaagcataacaaaaatcgcaatcttaatcattttcgcgcttccgaaaagatctgcttttttccccatatagaccgagctgaacgttcccgcgagatagacaataaaaataaaaccgatcacagtctgcgacaaatgataaggagccgccattaaatgaaagccgatataattatataatgtcacaaaactccccattaatataaatcccagagatattaacaaaagcagccgtttgcggtgcaggaccgctccgtattccttacatgccgcttttacgcccgcatgccgctcagatgaatggcgcggagccggaagaaaacgccaaaacaaatagcttaatacaatagaaagaatgccgatgatggcaagcgcgggccgccagccgaatacatcggtcagaagccccgttaacagcctgccgctcattcccccgatgcttgtgccgctgatatacaagcccatcattttcccgaggcccttcggatcaaactcctcgcctacatatgtcatagcgacagccggaacgcctgccaggaaaataccgagcagccccctcatcgccaaaagcgccggaaaagccggactgaacgctgttaataaacctaaaacagaagtggctgttaacgacagcaccattaatttttttctgccgaatccgtcagacaacgaagcggcggccaataatgaaaatgccaaaacggctgttgagatggataaagttaagctggcagccgcagcggaaatatgaaactcttccgaaaacaaaggcataagcggctgtgtcgtgtaaagcgtggcgaatgtcacaaagccgctgataaacagagccaagctggcctttctgtaagcctttgtatgaggctgaataaacgtcatgaatgtccctcttttctcactgttggttatatatgtatcgtacgcttttcatttctatgtgtctaatttataataactatagaattaatgcgtgtaggttatgagaaaggggagaaggagaaaatggagcttcatcaaattgacaacttcattgcggcggcagctcatcagcatttcacaaatgcggcaaaagaaagaatgatttctcagccggcattaagccgatcgattatcaggctcgaagaagaattaggcgcgccgttattttacagagagacaaaagccgtccggctgacaaggcacggagagcagttcttaataaaagcaaaacaagcgagacgagctttaaatgaaggcgttgaacaagtgaaaaagaatatgagcctggagcacggcgaaatatctgtatcatttcttcatacgctcgggctgcgcttaatgcctcagctgattgccgaatttaaaaagctatacccaaacgtgaccttccggctttatcaaggcgcaaatgaaacgcttcgcaaaatggtggaaacgggagatgcggatatctgtctcagctccccgccgcttcccagcgagcttttacaatggacagtgctggagaaagagcctctttatgcggtgctacctgagaaccacccgcttgcagaaaataaaagcattcaaatgaaagagatgcaggacgaggattttgtaggttttaaaccgggatacgggctgagatatatgtttgatctgatgtgccgggatttgaatatacacccgcatctcgcatttgaaggagaggaagtgtcaaccatattaggactgaccgccgcgggtctgggggctgcagtgctgccgaaaaccgcggagcattcatactttccggtcgtttttcttccggttgcagattaccaatgcgaacgcaccatagcgttagcccagctgaaaaaccatgctctctctcccgctgctgagcgttttaaacagtttgcacttgagtattacaaagcacgcaactgagcggtcattttattaaaatcgaagttgaaaataaagcagacagaaatacagaaaacggaggaaaaccatggcgaaaaaaatagtgaaaacaaatgctgtccgtatcattgagcagcaaaacattccctatgagctattaggttacaaaacagaagggggacagcccgcagacggtctttccgtttcacaaaaaatcggatacgctgccgaatatgtttataaaaccttagtggcatctgcaggaactgatcgttattacgtctttgttgttcccgttgcaaaagaactgaatctgaaaaaggctgcgaaggcggcaggtgagaagaaaatagaaatgattgccatgaaggaccttttgggagtaaccggctatatgcgcggcggatgctctccgatcggcatgaaaaaaaggtttccgacttttattgatagatccgctgaaacactggagtttatgattgtcagtgcggggaaaatcggaatgcagctgaaagtagcgcctcaagatttagccgaagcaagcggggcggtatttacagacattgtataaatgtccgatgaatctaatggaatacacgtgtcaagggagaatgataatgaaaaatagatatgaaaacttgaatggcgtgaagaatgaacatggattcagggacatgtggaaatggatgaaagaacgaagagagaaaagcaaagacttaagcgagaacattccgaaagcggtcactagggatgtccgtgatgttgccgtcaatcggacggaaaccgccataacatggatcggccattcttcatttctgatccaaatacaggggcttaacataatgaccgaccctgtatgggcgcggcggatgggttttcaaaaacggctgacagagccgggatatgaattgagcgaactgcctgacattgatgccgtgctcatttcacacgggcattatgaccatcttgattttccgagtataaaaaaactgagaggaaacccggatttttacgtgcctgcgggattgaaaaagctgttcaacaaaaaaggccgcaaaaacgttcatgaaatgaattggtgggatcgttttgagatgcggggggtcaatatatcatttgttccggcccagcattggacacggagaacgctttgggataccgatacctctcattggggaggctgggtcatagaaagcgaaaacggcgagtccatctattttgcaggagatacaggctattttgaaggctttaaagaaatcggagagaggtttcgtattaaggcggctctgatgccgatcggagcatacgaaccggaatggtttatgcaagtgtcacatatcaatccggaagacgccgtgaaagcgtttttggagctgaaggctgacagtttcattcccatgcattacggggcattccggcttgctgatgatacaggcccggaagcattaagcagactgcacggcgagtgggaccggcttgcattacctcctgaaaacctgaaagcattagcgcttggcgaaacattttggctgtaacagcaggttttcgccgccgacaccaatcgtttaaaaacggttggtgttttattgtcaatcaaaggtgaacagcctctgtataaaacatgatttttccggaacctgcggtaaaaaacaaaactttttactcttttgtttcactataaaatgaaaacggtttcgtatgcgcagtatatttaacctatcacaattgctccagcagaaacggacaggaaggatagaaaaacagatgaaatacatgaattcaaggcagaaaaagattttgtatctgttgttatctgaacctgatgactacttagttgtgcaagattttgcagacagggtccgctgttctgaaaaaacgatcaggaatgatttgaaaacgattgaagatttcctgaatgaacatgctcaagctcagctgatccgcaaaccgggattaggcgtctatttacatatatctgaacaggaaaggtcacggttaagccggcaaatttataatgagcactttacatgcaggcacaagaccgatgaagaaagaatacttcacatcgcttatgatttattaatgaattcaaagcccgtttccgcaaaagaaattgccgcacagcattttgtaaacagagcttcgattaaaaaggatgtaagtgcggttgaagagtggctgaagcgatttgatctcacgctggtttctaaacagcggctcggcttaaagattgaaggggacgaaaaaaacaaaagaaaagcattggcgcgaatttcagatttgattgataatgcggaatttacaagccaatttataaaaagtaagtttttaagtcatgaagcggactttgtgagaaaagaactcaagttattacaaaaaaaccattctatctattttacggatgaaacatttgaaagtttgctgctgcatacattgctgactatccgccgtatcaatatgaaacagccggtcgccatttctgcaagacagctggacgcggtaaaaaagaagaaagaatatgaatggacactggcttgtttaaaacggcttgagccggtatttgccatacggtttcctgaggaagaagccgtctatttaactttacatataataggcgggaaagtccgctatccatcgcagcaagaaaagaagcttgatcttgaagattctgagctttccaaagtcgtcaggcatttgatcaatcgtgtttcagaactgcaaatgctggattttcataaagaccaggaactgatcaacggattgaacattcatctcgatccggtgttgaagcggctgagctatgatctctctgtttcaaaccccatgcttcacgacatcaaaaaaatgtacccttatttgtttcatcttatcattgacgttttagaagacatcaatcaaacatttgatctctgtattcctgaagaagaggcggcatatttgacgctgcattttcaggcaacgatcgaacggctgcgccgaagcagtcataatcctaagaggacgatcatcgtctgccatatgggcattggcatgtcgcaattgctgcggactaaaattgaacgcaaatttcatcacattacggtaaaagactgtatcgcaaaagcggagctgacagagtatatcaaaaagcataaagatatagatttcgtcatttctacgatagggcttggaaatgtaacgatccctcatattgtcgtatcaccgcttttggagtctgctgatgaaaagaagctcagcgcatttatgcaacagcttgatacatcacaccgccgggagcaaaaaacgtttaaaatgctgaacgacacgactccgtttctcgtttttttacagcaagagacagagcaccgttatcaggtcattgaaaagctggcgcaggctttgtatgaaaaaggctatgtagaaaaagagtatggcattcatgcagtaatgagagaaaaaatgtcggcgacaaatatcggggcgggtattgccatccctcacgcgaactctaaatatatcaaacaatcagccattgcaatcgccaccttaaaagagccgattgagtgggggacggaaaaggtgtcgctcgtttttatgcttgccgtcaaacacgaagatcaaaacaaggtaaagcaattattcagtgagctttcctatcttagcgagcagccggcatttattcaaaaactgacggaagaaaaaaatgtaatgacgtttttatcgtatttaaactattaaaagcagggaatggctccctgctttttttctgtttatagggaaaaatgccgttatttccggaacttatggtaaaaaaacgcgcttatcacaggctgatttcagtataaagttgagacaagatcttgaaattcagactgcaaaggaggatttatatgaaactgttagcgattacatcatgtccgaacggcattgcccatacgtatatggctgctgaaaatttacaaaaagcagccggcagattaggcgttgagatcaaagtggaaacccagggcggaatcggggtggaaaataggctgaccgaagaggaaatccgggaagcagacgcaatcattatcgcggcggaccgttcggtgaacaaagaccgattcgcgggaaaaaagctgctggccgtcggggttcaggaaggcatccgcaaaccggaagaattaattcaaaaagcgcttagcggtgaagtgccggtctatcaatctgcttcaaaagctgaatccgcaagtcagcagggcaaaaaacaaaacccgatttaccgtcatttaatgaacggcgtttcttttatggttcctttcattgtcgtcggcggattattgattgcggttgcattgacgcttggaggagaaaaaacaccaaagggcttagtcattccggacgagtctttttggaaaacgattgaacagatcggcagtgcttctttttcattcatgatcccgattttagccgggtacatcgcgttcagcatcgctgataagccgggtcttgtccccggaatgatcggcggatatattgcggcatccggcagcttttacgacagtgcaagcggcgcaggattcctcggaggaatcattgcgggatttttggcgggatacgcggcgcttggaatcaaaaaatgtaaagttcctaaagcaatacagccgattatgccgatcattattattccggtgtttgcctcactgatcgtcggtttggcgtttgtatttctgatcggcgcccccgtcgctcatattttcgcatcattaacgctgtggcttgcgggaatgaaaggttcgagctcaattcttctggcattgattttaggagcgatgatctcctttgatatgggaggacccgtaaacaaggtggcctttcttttcggatcggcaatgatcggagaaggaaattatgaaattatgggcccgattgccgtttccatttgtataccgccgatagggcttgggattgcaacgtttttaggaaaaagaaaattcgccgccgcagaaagagaaatgggaaaagcttcatttacgatgggcctattcggtatcacggaaggagccattccatttgcggcccaagacccccttcgagtgatcccgagtattatggcgggttctatgaccggctcggtgatagcgatgatcggccatgtgggggacagagtggcacacggcggacccatcgttgctgtacttggagcagtagatcatgtactgatgttttttatcgctgtaacagcaggctctcttgtcaccgctctgttggttaatgtactgaagaaagatatggcgaaatcccccgcgcccggcgaggtgctgccgtctgccgcaccaaatgaagctgcagcggcaaaagaaacaaaggaaccatctcaggctgacagccgaaaagccgggatgaccgaaatcaaaaaactgactgacattatcagtacggacttgattgaaccgcatttatccggcgaaacgagggatgacattatcgatgaaatgatcgagaaaatgtcccgtaaaggtatgctgctgtctgacagcggatttaagcaggccattttgagtcgggaacagcagggaaccacggcgataggtatgaatatcgccattccgcacggaaagtctgaagccgtcaaaacgccgggtgtcgcattcggaataagacgttcgggtgttgactggaacagccttgatggttctgatgcaaaactgatttttatgattgccgtaccgaaggaaagcggcggaaatcagcatctgaaaatattgcagatgttatcccgaaaactgatggatgacagctatcgggaaaggctgctcgccgttcagacaaaagaagaggcgtatgagcttctggaagaaatcgaataaagcgggggatgatcatgtctactgaaccgatatttttcaatccggttttcaaagaaagaatttggggaggcgccgccctgcgtgattttcactataatattccgtccgagcggacaggggagtgctgggccttcgccgctcatcaaaatggacagagcacagttcgaaacggcatgtataaaggatgtacgctcggtgaattgtgggagcatcacagagatttattcggaaacctagaaggagaccgttttcctcttcttacaaaaattttggacgcggaccaagacctttccgttcaggtgcatccgaatgatgactttgccaaaatgcatgaaaacggggaacttggaaaaaccgaatgctggtatatcattgattgtgcaaaagaggcggagatcattttcggccacaacgcaacaacaaaagaagaactgatatccatgattgagcgcggagaatgggacgggctcctgaacagagttaaggtaaagccgggagatttcttctttgtcccaagcggcaccgttcacgcgattggaaagggcacacttattttagagacgcagcaaaattcagatacgacttacagattgtatgattacggaagaaaagatgcggaaggcaggatgcgcgagctccatctggaaaagagtatagacgtgatagacattccatctgtccgtgaacggccgaccgttcaatataaacaaacagatgatctgctggcagctgttttaatagaatgtccttatttttcagtcgaaaagtgggttgtaaaaggtgaagcaaatctattccagcatcatcccttccttcttgtcagcgtgatcgaaggagacggaataatgattgcaggcgggcatgaatatccatttagaaaaggagatcatattctcctgccttccggtttgggagaatataaactggcaggccatgcaaattgtattgtgtctcatctgtgatcctcaaaacccttctcttgcatcagagaagggtttctcatcacttttgcaaaaatacaaatttccagcgtatcagtgttttcgttcctgaatttattctctcaatttgtatatctcccgagccatcgattcaagtatgtacatagcggggatttgggtggtgatattcgcattttcaacccattcttccgtcacgtaatatgaaatattcacatcggacattttggcaatggttgaatgtttatgatttgtaatactgatgacccggctgccttcttgtttcagctgattcagatgagtcaccgtagaatctccttcacctgaaaccgataatgcgattgttatgctgttatggcggaaatgggaatgggccggaaagtaaggatctttaatatacattgaaagtttccctaagcacgaaaaatatctggctccgtattcggcgagaattcctgaacttcccactccgataaaaatgacgctttctgcatcggccgcaagggctgctgcttccttcagcttttcttccatgcctccgcttactgttctttcaaaaaactcggcaacggaatggtggggactctttaaaatcgtttttttatttgcctccgtatacatttttagcttcaccttaaactccgaaaacccttcacagtttatttttttgcagaaacgtaaaatagaagccgtagatacatgggtttcatttgccaattcacggattcgcatatagacgactttctcgctgttttgggagatgtagttgtataaagaagtttcaagctcattaaatgaagcaatcatttcgtgtgtgaacatgcagggggattctcctttttatgagaatggtgaatgtacatctaatcgtaacatatcatttttaaaagaaacatagtgttatattgatgtgacaaatcactttttgtgtcattcaaaacaagacgtcagccaatgatttacggcgcaaaacaactgcggatataattcgttcatacgctttatgcatgatctcttcaagggtctctgacaaaagcggccgaaaaaaggaggacaatatgagtatcaaactgatagcggttgatatggacggaacgtttttgaatgatgaaatggcatacaacaaagagcgttttatgaatcagtatcgtgaattaaaagcgcggggaattaaatttgccgtagcaagcggaaaccaatatgcgcagcttacatccttttttccggagatcgaaagtgaaatcgctttcgttgccgagaatggcgctttcgtcgtgaatgccggagaagaattattcgcgggtaacatgtctgaagacactataaaagcagtaatccgtgctttagatcagtatgaggtgaaaaacgtcattgtctgcggaaaaaaaagcgcgtatattcatgaaaatgccagtgaagatgaatatctgcatgtcagtaagtattattatgtgttaaaaagggtgccgcattttgaaaacatcgatgatgacattttgaaattttccatcagctttcccgccgaacattgttccgcacttctgagccatttaaaaaacgcaatcgggtctttcgttacgcctgtatcaagcgggcacggtgacatagatctgatcataccggggcttcataaagcaagcgggattaagcttctccagaaacaatgggggataaatgatgaagaatgcgcggccttcggagacagcggcaatgatttggagatggtgtctgccgtgaaatacggagtcgctatggataatgcgcaggaaagcattaaacaggctgccgcgtatatcacgcaatcaaacaatgaagaaggggtcttaaatgcgattgattccatcctcaaatgtgaaaaaccctttgtctgaaaaagacgttttaactgcggaggtgctgaacgatgattaaattagtgattacggatttagacggcacatttttaaaaaatcgaggcgattttgacagaacgttatttgaaaagacaaaacgagtaatggaggaacagcatgtcgctttcgccatctgcaccgggaagcagtgtgaaagggtggaagctttattcggagaagacgcgaaagatttttggattttaggagacagtgccacacgtataaaaaagaacggcaaattcgtatatgaatctttgatcagcaatgaagcgggactgtcaattataggcgctttagaaaaaatcagctgcgggcatagcattatcgcatgcacaaaaaatggcgcgatcgtaaaagaaaatctgtctgaaagtgagatgaaatatgtaaatgcctcttatgcacatgtaacgaaaataactgattttactgagataaaagacgattttatcaagattacggttcatgatcccgacgccaactgtccggaaacgagagaaaagctgcatgaattttttcaccaattatatatcgtagcatcagaggatacctggatggacatatcaaatatcggaatacataaaggaacaacactacaagaactgcagcgattattaggggtttcggctgatgaaacaatggcgttcggagacggccgcaatgacaaagaattgatggaagcggcatcctacagctttgcggttaagaatgccattgacgaaataaaagatgcggcgcactttgtcatcaaatcaaatgaggaaagcagcgtcatgcatacgattatgagaatattagcgctgcaaaaacaatgatgggctaaagccaatgcggcaggacttactagggaaagaaaaagcgggctatcctcagactttaattcactcctgatttccctgaaatatgttaaaaatgaataaatatctatatttgactcgatgatattggtataatatgtataaaatgaatgaaacggcataatatcaagatgaaaaaaattacttcatatcagacaaaaagtaggaacttcctcgtttttaaataaattgggaggtgtttgtattagcccgctgttgagtcccgcgtatatcattctcatttttcttccggcagcttcttttctgttagggatattagggtatttcatctttaaaaaagtatggatgatggttgttattgtcttcattttgtccttgatattcatgtttattgtaataggtgccgagccgacatttttcatttgggtggctatgatgacggggagctgttttgtctccggttcaatcactaagacgatatggacttttgcaaagagaaaatattagacagaagaatcctgtttgaacagctatcctttttttgtcgattgaagaaaaaagaagtatagagttatccgttatgttcttatattttgtctgttgttgtcagatcgggctttctgttaaaaatgtctgtctatcgttttgttcttttttaactaagcggagcactataattgaactgtagatacatagaaaaacaaaaaaggataaggaggatttttatgtttcaaaccttagaccattttttgaaatcttgggagttcgaagccgatgcgacacagaaactgctgaatcatctgactgatgaatcacttaaacaagaaatcacttcacaacattggactttaggccgtattgcatggcatactgtcgcggccattcacatcattacctcaaacacagatttaacatttcacgctccggctgaagattatcctgttcctgcctcggcgcggtttattgctgagagttatcatcaagccagtaatgcatttgtacaggcgttaaaaacgcaatggactgacgatacacttcaagaatgtgtcaactttattggtcagcaattgccgaatggttcacttttgatgtttttaattcaacatcaaaaccatcatcgaggacaaatgactgtccttatgagacaagcaggtttacctgttccgggtatttatggtccggcaaaagaggaatggacaacattcggtttggaagctccgaaataggatgttgatgtaagggctcgaatgaatagatgataccaatcgatgttggtatcttttttgttttagtcttagagtgattaaaccggtatccatgacatgccgccgaatcaggcagtacagtttaaaagagaaagtaaggtaaataaatgcagaaaggtgattatgatgataactaaaatgacgcgattcaatatgaaagacttcaataaaccaaacgaacctttcgttgtttcagggagaatcatcccctcatttaaggacaatgtttggacatatacagaggagaaatttgctgaaccttatgtcaaaaaatatgacgatgaagacattgatgtcagttatattgaagaagaggataaagctgtctttttttattacgcagagaacgactgtgtcggccggagtaagcttcgttctaattggaatggatacgcactgattgaagacattgccgttgcaaaagattatagaaaaactggtgtcgggacggctttattacataaagcgattgagtgggcaaaggagaatcatttatgcggtcttatgcttgaaacacaagatattaatgtttcagcttgtcatttttatgccaaaaataactttgtcataggagcggtcgatacaatgctttattccaatttttcaacagcaaatgaaattgcggttttttggtactgtaaattttaaagataacagtatttgatgtttcgtcatttagcgggtgtgtgtcgcgaagtattcaaaacatcggcttgaggatttataataaggtatatcaatcaatgcagggggagttatggatgaagtgcaaaaaaatgaacagggtacaattaaaagagggaagcgtatcaatggccctataaactgcgtctgccctcattaatggagggaaagttgtgaatacgccttattcacagtcagctttacggcacaaccaagtgttcatttggctttgtgttctgtcatttttcagcgtattcaatgaaatggttttgaacgtctcgctgcctgatatcgccaacgattttcataaactgccagcgagtgcaaactgggtgaacacggcctttatgttaaccttttccatcggaactgctctgtatgggaagttatcagatcagctgggcatcaaaaagctgctcctatttggaattatggtaaatggcttcgggtcgatcattggatttgtcggacactctttctttcctgtactcgttctggcccgatttattcaaggggctggtgcagccgcattcccggctcttgtgatggttgcagtagtacgctatattccgaaagaaaacaggggtaaagcatttggtctgatcgggtcgctggtggcaatgggggaaggcgccggaccagctattggcggaatgatcgctcattatattcactggtcatatttgctgcttattccgacagcaacagttatcaccgttccattcctgatgaaattgctggaaaaggaagaaagaatcagcgggcgctttgatatgacggggattatattaatgtctgccggcatcgtatttttgctgctgtttacaacgtcatatagaatgtcttttctgatcatcagtattctagctttcctgatatttgtgaaacatattaggaaaactcaaaatccctttgttgaccctgcactggggaaaaatgtcttgtttatgatgggcgtcctttgcggaggcctgatattcggcactgctgcaggatttgtgtctatggttccttatatgatgaaagatgttcaccatttaagtactgcggcaattggaagcgggattatgttccccgggacgatgagcgtcatcatcttcggttacattggaggattgcttgttgatcggaaaggttctttgtatgtgctcaccattgggattgtattgatgtcttccagttttttaatcgctgcctttttcatagatgcggcaccttggctcatgaccgttataatcgtttttgtttttggggggctctccttcacaaaaacggttatatctacaattgtgtctggcagtttgaaacaaaaggaagccggcgccggaatgagtctgcttaatttgacgagctttttatcagagggaacgggtatttcgattgcaggcggtttattatcgatccgcttgctgaatcaaaggctgctgcctgttaacgctgatcattccgcttatttgtacagtaatatgctcattctttttgcaggaatcgttgttatgagctggctggtaaccgtgaatgtctataagcgttcgcgaagaaatgactaaaaagggaaaaggatcaaacttgataaaagttttgatcctttttttgaggagcttccttattccggaaccttttatcgatcaatgaaaggggagttaaagtgaattacatttataagaaaaagaaaaagaaaaatggaaattgtatcatttcaatcagagataaatgggagaacgcacttattgagtttgaacgaaaaaataatcaaattgagatcatgatcaattatcgtaatgagaaaacaaccaagttttcactgccaatcgagacttttgagaaagtgtatgaggatattaaaataggccggagagaaagttaatcattctgtttgaaaatgaccatgaagttcgtaagcagtatggttttaacacgcatttggattcccctgtcaaagtgaaggtttttgggaatttatattaaaataatagtaagaaccttgtgcagcggacagggagtttcgttgctttataaggagagggaactatgaaaaaaaatattcacatactgggagcctccggagtcggaacttcaacattgggtgttgcattatcaaagcatttgcctcatgcgcatcttgatactgatgattactattggacagataaattcactaagaaaagagaaattcctgaaagaagaaagttgcttgaaaaagacttgacaataaatgagaaatggattctttctggcgcagtgtgcggctggggcgatgatctaaaaagttattttgaccttgtcatcttcttatggattccgcaagatatacggcttgagagattaaggcagagggaatttcagcgttatggaaacgaagtgttagccggcggcagtaaatatgaacaatcaaaaacatttttagagtgggcttctttatatgataatgccggaatggaagttagaagcaaagctttacacgaacattggatggcagatttatcttgtccattgttaaaaattgaaggagattactcagtcaatgaaagagttgatcgtgtcttggattatctgaattcaaactaacggatggagataactgcaaaatccaaaattcaaaggcagttccggccattttaacggagctgtttttttataccgctttcagtttctctgttgtgaagtgatttattttcggcagcatcccacaatagagaagtgatttgttcttcgttaagttctccgttggagtatttctctaaaattcgtataaatcgttcatcacctaattaattatttctttgtttatttttattctccatttcattttcagaccgaattaaagccctctcataacgagaagggctttccgccttttaatactttctcctcaaaaagaaggggaaggctttatccgtttagccctcgtatcgtttattaatcaactctgtaaacatggggaattattggttaacttagaattttttcgacccaaacaaatatctttaaaaaagttaccggcaactttctgcggcatatcgcagtgttcaattgtttagtgcttttttttcataatctttacaaatctgaaaaagtcatcatcatccggcaggggcttgtcatcttcgcgtccattgcgatgcatatgcggatcagagtgatgttcattgtagaactctacgatatggaatccgcacttattcacatagaagttgatatttcgcttttcaaaataaggtgtcacggtttcccaaagcacagtatccggatactgtgcttctatggctttccaagcagaaagaccaatcccctggctgtgatgttctggagatacatagaataaatctagcgaattatgatgtgtttcgctgttgatacgtactactgcaccacctaccttctcaccatcccgaagaatatgatatacgactgcttcgggagcgtcgaaagtctcctgaacatcattgtccgatggaatcggtccatcttcgcaatcaccgaacgtttcaatcacggcgatcgcaaaggcttcttgtaattttttttggaattctggcagatcagattcctttgctggttccagaataacttttggttccttttttgttttcatgattgctcactccttcagttgctgaaataacgagttcagtcgttcagtaaaacattccagctgctctgccgctttttcttccgcggtaaatttggcgttaaaatacttcaaaagctttctcctgtctttttgtaagctgcatgtaacccttatttactatcgttcactgccgtattaagtgtggtacgcgggatttgcaatcattctcaaactttacctgcgaaaagttgcaaaaatagtcgaatgtggcgcctttgcctatgaacatgcgtaaaagattccaattcgatcatgagcaatgcacattgagtaaactccggtgaatttattagcccaaagaagcctaatagatataaaaataactagtatatatatcaaatctgtccgtttaatgcccacttctcaacaactaatttgaagtcatgcaatctgtgcaaaggggttatttcggaattgatttttccgaatgcagcggagtcgctttgggacttccgtttactttgccgtacgtcagcttgcgccatatcaattccatcggaccgtacttaaatcgtttcaaccacaatgtactaaagctcataagcacgaagtacacggccagactgaacatgaacgtgccggcggattgaatatgatccgcaagcccgaatccgtacctgaggaacaaaactgttccaatgatagagtgaagcagataacaggtcaatgacatccgtccgactttggtgaagatcatcatagggcctcgcagctgaggaacgtacagaaacagcattgcaaaagtgctcatataaaacatacttccggttaagccgccattttgacccaagacagaggaaatgtccttccacagcatattctcagaaagattaaacatgtctagtaatatactgctttgtgttattagaaaagcgattgtgctgatgatccagatacgcttccatatgaacttttttgcttccatgtctttgaaaaattccatcttaacaaagtacacgcccagcagaaacatgagaaacatggaatagatcatagagaaagagccagccgccatcgtgaccatatctgtccaccgagtgctgatggattccatgtaggtaaggcttgtgtggctaaacaaagtaaactctgaaaaattcgggttttttgaccctgcagtattgatgacattgtacaacattgtgaaaacaggagtcaggaattgaaacacgataagtgcgataatccatctaagcaccgttttggccgtgcgtttatagaaggcgagtaacaggaagccgcttacggcgtaaaaggtcaatatgtcaccgacccaaacaaatgtgatgtgcaaaatgccaaatcccaacaggatagataacctacgggcaaacagcttggtgggactatctaccttctgcgcggctcgatccataaagatcataaacccaactccgaacaagaaggagaataatgtaacgaatttcccttcggcaaaccaggaaaccagattgtgcaggccgtcatcggaggccatttcgaatccctttactgaatctacgatcagaaaatagttgacaataataatgccaagcaaggcaaatccacgtacgatatccagaaaatgaacccgttcccgcagactcactggttgcccgcgttcttctttttgtacaatcatatcaatactcctttcccatttaccattgcaatgtgcattgcggatctgaaaaactcgagccttacaatggataaatataaagacagaatcttaacaatttatgaaggttcatcatttttttaaaaatgtgacaaaattgtggcggacatcagctttcataaactgttaagatttacgtagtatcttataacgtacgttacttatgaatgatatatagtaaggtcacacgagaaataacatcaagaatcatgaggtgaaagaggcatgacccatcgaatattagtcgtagaggatgatcatgatattggtgatcttttggaggaatcccttatgcgagcaggctacgaggtgctaagagccaaggatggaaagcgagcattgcaacttgtgaatgactcacttgatttggttattttggatattatgatgccaggcatttcgggaatcgaaacctgtcagcacatcagggaaacctctaacgtcccaattctgtttctgacggccagatcgagtacactcgataaaactgagggattactcgccggcggcgatgattatatgactaaacccttctcggaagaggaacttcacgctagagtgattgcccaattacgcagatatacaatctatcaggaaaagaaggaacaggaagaaacatttcttatcgggggcaaactgagagtgagcgaagaatttaatgaggtctggaaagaggagcagcaaatcaagctgtcagatctggaatatcgtattttgaaactgctgatgagcaaacgcaacaaaatattttctgctcaaaatatatatgagagtgtgtggggacagccttacttttactgttctaacaatacggtgatggtgcatattcggaaactgcgctccaaaattgaggatgatccggcacgtccggtttatataaaaactgaatggggaagaggatatcgatttggcacatcgtaaattcacgctaaccaaaaaactggctttgctgatcatggttgctgcgattgtgagcggtgtgatctttctgacgttgcaaaagattacagatgatctgatcgagggatatctgagttcggatgagtattatcacaaggagtcagcgagatacattcaaaaattcagtcagtacgtttcagaaaatgggttgtctacagcggatagaaaagcgtttggcgagtgggtcaaaaaagaaaattacattaacctcaccatatttaaggatcaggagctgcaatatgattccgtttattccgaatcggattatggaaaggaaaagctgactcagtatgctcaaaatcattcacatcctgtcaagttcagcgatggtgaaggacgagtcattatcgacggtttctactcttcccgatattatgatctggcttttacattggatttgctcggtgcaaccctcatctttttaatcattgttctcttgggcattcgccaaagtcttcgctaccttaaaacgcttcaccaagagattcatattcttgaagggggccagctggactacgagatgacgataaaagggcatgatgaattagcgatgattgcaaagagcattgaggatctgcggaaagctttcttggacaaacttaaagcgatcgagaaattgcaagcagagagccgcagcctggttaccgaaatgtcgcacgatatgcgtacaccgctgacgtcgctgatcatgaatctggagtttgccaaaaaagaaggaggcgaagcgggtgccagcaaagatcgttatgtagccaatgcttatggtaaagcactgcaattaaaaaacttgtctgacaatctgtttgcgtatttcctgctgaataaggaacatggggccgacctggagaccgttgcagtgaaagaagtgatctacgatctaatatcagatcagattgctatccttcatcaggagcatttccgggtccatatttcaggcgagctgccggaaacctatattaacgtgaatttggaggagcttggtcgtgtatttgataatgtgatgtcaaacttatttaaatacgcagatccggaagaagaaatcagcatcacgtttgtatcggatcaagaaatatttgagattcatatcagcaatacgattaaacttgcggatgtaacgccggaaagcaacggactcggtgaaagaagcattgcgcgaatgatgtcgcgcatgcaggggcagtttcacagtatacaaaagaattccaagtactgcatcgtgctgcgattttggaacagaaagatgtaggctgcggatcaaaacgacgaaaatattgaaataggagacaacaagatgagattttccaacaattttaaaaaggcgccttacctgttacaagcgcttctcaatgtctgcctgttcttcctggcgatagccttaagcggacttctgatcagcgagacatggtacattgtgcaattcgtatacaagtcactgttcaacaaagtggacagctattatgagatgcttggggaactgcttatattcttcatgtattttgagttcattgctttgattatcaaatacttcaaatcagactttcatttcccgcttcgctactttatttatattggcatcacggctgtcattcgtttgataatcatcgatcatgatcaggcgatctcaacgttctggtgggcgatggccattcttgcaatgatttgtgcattctttattgtcaatagacgaaattctgttgttgaacattaataaattagttcactttataccgatacgccactgaaatgtcctatgacttacttgaatactgaataggtgtaaaaagtggttattcatacggattgaaaaagaagaacacgcagcagattcacttgctcttgtttggggcaagtgttgacaaccctattactggtttaattaaagaaggagtataaaacctgtatcaatgatgttactagatatctgcgacacaggttttatatgtaggtaactcatcttcttatatatgtaacattgcattttttattatgcaatagctcactctatttctgctttcaatttttcgaaccactctaaattaaccaagtgatgtgaacgggaattttcattcatacggcgaaagtaattgattgtgccgggaatttcttgagtgatggacaggtattcatcaaggagttcgattcgagttttagtctgatcgatttgtgattggatcagatccagtaatttatttttatcgaattcatcagcaaagagtaacgccccataaaattgcaggttcacatattccgatttggtcccgtatttgatcattaatttctcgaattctgcccttcccgattctgtgacgttaaagttacggatttcacgcccgctggttgagggcttctgctgaatctgttcaatcaaacacttttcttcaagttgctgcagattgtaataaaatgaacctttcgtgaagttaacaatgtatttgtaatgacgtttttccattaaagccagaagttcatagccgtgagctccggggttttggatgagcaagccaaggataagtaagggaatcatggtttcatcaccttcgccatccgcgcctcaaattccgcgtacgtgatttcacccgaagccaaatccatactatgaaggtaaatctgttctgttttagaatagtcaccattcactttcagtgattgctcctctcccgaaatgggtttcaggatatggtgcttttccgaaaaagcctcgaaatagcggtaaccgaatttgcgttgtgaaactgcgtctaaatgaatgccatcaggattcgcagtcagacctgccgcagtaacaaaataacaattctgttgttcattagcaaaacgtagcaattgttcattaacctgtcgaaattcagtcgcgtgctgtccaaaaccagtcttcccaagaaagtcaccaagccctccaataatcaacggtacctcatcaagtttcaactcgtttcttagcgtctcgatgataagagttaatttctcgtaataagtttcatgcagcgaacgataactgtcactctcaccttggtgccaaaggattccgcaaatttgactggattggagggcgaagcgggcttcggacaaagcatgctgaaaaaggatgccttccggatgccagtcattcaatgaactgccaccttccgaacacgggatcaatccaatttcttcatcgggatgagctttcgaccaagcatctgcaaaagatgccgccaagccaacgccggaaaccggacggtcgtaattaatcggctctgtcatcatctgccactgtccattgcgcagcatttttattttttcattatagatagggtctacttcattcaaaaatccacggcccgccatattcgactgccccaacattaaaaaagactttatcatttaatttttcacttctttacatcaatattttagtctaattagactatagtcaattcagcttgtcttgtaaagtttcaactaggttttatttttttgttgagcttagaggatatcgaaaaaatttccacccttgataaaggagaaaatcttttcggatcgcaccaagatccggaaattgtaaaatcgataggcgccatgaaattcgacctgtaagctttgtctaataaaacagttaggtttaatgaacttaaaaggttaatcccatggattacacagagaatattgatacgaaaacttagagaattagaaccttatcgggtatgaaaattattcgaaaattccaagtttgttcataaggaagggttaatgctaaaaagactgcgtgcaacttacattttaacggaagaacaatttgatgagatggttaaaccagaaaatctgaaacctaacatttgaatcttttaagataaaaactagttactaatcagtaactagtttttcttttttccaccgttgaaaatcacctcagtaggacaaacttcaggatgatagccattagctgtaaggttatcaaccgaggaacaagggctcgagcatcggcagccagatcgaggtctgcataaagaaagcagggactgaaatatgcctgtgaaggattttctgaggagctttttagagcgtccggcgttgaatcgtttgagagaggacgcaagttaaggacttataagtcaagtcatttgataccaaaatgcagtaacgaatgagaaaaatgatattttcataactgtcatatctctttttctatattctgactttattgaatctgagtctccggtggatattatgccggctgaagtgatttccgtttcatctattgaaataaggcttaatgaaaatgacaattaataatacctgctgatttgattattattcctaaacggttgcgctctggagaagatgaagaactgaaaatgggtgagaatttgatggttttctccataaaggcggacaatcattttttattctcgaaaaaatttaatgataataatcctgaaaaaataaataattgtaaagacctaatctatgctatagaataactataatattttgaaaaatttcatccgaggtgggttatgaaaactattggtcttattggcggaatgagttgggaatcttcagctgagtattatcgaattatcaatgaagaaataaaaaagaagttaggagggcttcactcggcaaaatgccttttatacagtgttgattttaaggaaattgaacattatcaatccataggagcttgggataaagcaggtgaagctttaggtcaagttgcaaaatcattagaaaaagcaggtgcagattttattgtaatatgtacaaatactatgcataaagttcttggatatatccaagaaatgatcactatacctattttgcatattgccgatgcaactgcagaacaaattattagacaagacattcgctcagtaggattgcttggtactaaatatacgatggaacaagatttttataaatcacgtattgcgtctcatgatattaatgtcattgttcctgatgatgatgaaagagaattaataaataatattatttatcaagaactatgtctgggtgaaattaaacagtcttccaaaaacatttataagaagatcataaataatttggtggatagaggagcagaaggaatcattcttggatgcactgaaattggactattagtaaaggcagaggattcaaaagtgccattatttgatacgactttaatccatgctcaaaaagcagtaaataaatccctttcgatttcttcttagaatgattacttcctatatgttaaaaccgctctttaggagcggtttttattatggttcattcaatcaataaattgaggagcgttataggagtgatcttatcatgaccctttcctcagaaattgaatttgatgatattgaagatgacagcgaagtcatagggacctctcaaatccaaaatagattttgaaaatggccgtatcacaaatgaaatgatcacaggccttgaagcgatcaagcagtttgtatatttatcccttcatactgagcgctacgcatattctgtttaaagtcatgattgaaaaagatatattagaaaaagccgggatgtcagatccggcttttcgctcactttcccttcttcttccgcttctccttttccgctcgataaaactcatggaacatcttcatcaatgcgcgtttttcaatccgcgacacataactccttgaaatgccgagctcctttgcgatctcgcgctgcgttttttctttttttaaatcaagcccgaagcggccgacgatgacttctttttcgcggtcgtctaaaatgtcgatatattttttgaccttttcaagttccatgttgagctgaatagtgtcgatcacatcttcgctttccgacttgaggacatcgatcaggcttatttcattcccttctttatcctggccgatcggatcatgaagggagacgtcttttttcgtttttttcaatgcgcgcagatgcatagctaggaagtagggaagtagacgataccacacattaggcaatcagtattgttttagcccagtgcttgcgggcgacaactaaaagagattctgcagcgtccctgactggtctattgtgaggcgagttggtactcgcaacggaaaccctgagtaaatcaggaggataaacacataacatccagatacggagtcattatcggtaaggtagttagtataaaggctgaataattcagatggtacgaggtacgatatacgcttttggaatgcagtatacaggaacaaaaaaggaattcataatgtgcatatgaaccaggagaataccaaatatagttctaatgaaaacgatatatactatgttggctgttttcttctagaatttcgtgacgaaaatagatggtttgcagatttcctgacctttcaaagtcagtcttgatatacgaacgaacagggtattactcttaaagagaagtgtgtacgttgactgataccccatcaaaaattgcagatacgatactgtggaaattttaaattgcagaaatgatacgcagaaaaaccaggggttccaaactaaatacagtttagctcttacttgtagaagaggctctggataatctcctctaatactatgttgagtaaccatattgttgtgttggatatgtacatggatcatccttcttgggatcacctagtccttactaggactacttgtggtcttttttcatttagaatgcatttaatggtccacatgcactttctgattacaaaaaacatgctttgacatcgtctaaagcatgtaaattatttaaactaatatataacttttgctcatctatttattgaattcattaactgaaaatagtattcaggcttatgagttttatttagattgtaccatgaatgtaatgtatctggtgcgaacacatctaattttttcagtacttccatcgcaaattctagaggagctactcctgatgcagtaatcaaattcccatcagataccgcgggttccatctcataaaatttttctcctttataattaggacaggccattttcatatactctaagctattgcttgtatgctttatagaatcaaggtactcaatattagctaggccctcagttgcaccacaaattgcagcaacaatagcgccaagctttaaagcttcgccaacttttttcaacaggggtcgatgtatatcttccctccaagtagtccctccaggtaaaattaaaagatctttactcttaagattacattcgtcgaaggaaatatctggttttatgttcagtcctcccatcgtagtaacaatttctttattagctcctactgtaactacttttaatggagctacatcttttttgaaataccttccagattttagttcggcaattaaatatccatattcccagtctgacattgtattgaatacataaagataaactttttttgtttgcatccaataacaccccaatcgcatttgatatagtctattataatataacttccctgacagatagcgtcagggaagtatcatgcttgatgaaattttattaattccgacagaacttcgataagtcttttcttaagacttattggctcaataacttgaatagatttaccatacggtaaaagtaaatgaggtacatatttatgtatcagatttttttcaagaagaaatactgcttgatttgaagttcggtcttgtaaataatgttctaaaaaccaatgttcgcaaatatcacccaccgcccttgcatctccatttataaccaaagggataatcccttccttatcttctatagttggaaggaggttattcataaaaaagtcacgtgctgaaaaattttctggctggttaaacctgttttcggttagaattaggctttcaattcgatctactctgaaactacggatatcattcctaagatgacaaaagcaaatcacataccacttattattccaataaataattctgtaaggatcgaccaatctatctcttgattgctctccgccacttttattgtatagaatttttacagagtatccatcagttacggcaagctccagctcttttaagaaaggttccatagagaggggacttaatcgtcgtattacttctagactagttaaatgttggtttatctttgtttcctgctcttgatttgaatatttgctgagctttgaaatagccctattaagtgcttcacctccataatatccggcttcttctgcaaaaacagcagcgtgaaatagtgagatttgctcctctaaatcaaaaacaagaggagcttcaataaaattgttcaataatttgtatccaccgttatgtcctgtgtctgaaattataggtacaccacttgcggaaagtgtatcaatataacgatacacagtccttacacttatctctaacttttctgaaatttgtttggcagtagttttttcgcttgaactaagcatccatagaattgccagcatattatcaattttgggcatacaaattcacctctgtatggaatttttgtttttataaaaggtccccattcatgatgctagaaaacctggattgaagtttgcatcaatctttcaactacccatttcccaatgccacaaccgatgtcacatatttttgcattacgcaattgcgttttccctcttctattgaaatgagtctatataatttatttaacatactccttatattaacgtgttaggaaaagagaaaacaaggatgtttggattgattttgatctaattccaataattgatatctatacattataaaaaatgggaaattttcaaaaaacagttgaattatttgtaaataagtggtactttaataacagaagaagattagaaattttttgtaaaaagtgaatcaaatggttcaataaaatggggtggttcataagaatgtatcatacaaaaattgaatattaagtcaccgttagtctctgtgtaatattatatgcccctattaatgaaagcgattatctcaaaaaggaggataagttatcgtgatacatgcattagctaatgaaccgctaagtgccgaagcgaaagcagtggtagctcaaacgtattgtacgggcattgcaccagaggtctccaccgtcataaacctgaaggaggggatagccttcaatcgggaattcttgcgagagcttgtgattgccgggtggagtgagcagcttggccaatatattgagataattgaggctcggggtgcaacggactacgaagccctccgtctagtacagttagcagttaggtccggcgctgctctattcgcagtttgcaacgtgaggacaggtagtaaccaacgctgctatctgtcaatccaccatgctcttgcagatgagcagaccctcaatgttgttagcagtttagttcagttggcgcatgtaggaatgctagacttagcgctgcacgacattaatcaagggcggcaagcctactacagttatgtggaacgtcagctcgcgatagcaaaggaagatgttacgtcaatggagttacgcagaaaaccgatgaagcccgtgagactgtcggaatctgggcggcttgcgtggagcgcgcaagcaaaacgggtatccctgagcagagtcgtacggattgagaatgctgataaactacctatcaccgaagtcctagcgttgctatgcggcacaaacgtggtgtcggagggcgatacggtatgcttgtcccggtgttggcgtttacctcacgagtcaggggctatcggtatgatgaccggcctcattgcaatgcctatcgagcagatccaaaatgccccgactcagtttcggacaagcctggaggcccgtgcacggcacaactcagacgcccgtgaggcactagagtgctgccgagcgtccgaactgtttatcaatggtgcagccccgcggggaatccctgcgtcgcaagtgataagcgcgacattccctgtgggtatggatattaggagaataagtgcctcggagttccgactcgagttcgagggccaattttgcagcaagattgctgctaacgacttactcaatgagcttgctgatatcctctcggataagaaggaaaagaataaataacattttggttcaatgattatttattacaaattttattacaaaggagaatgagatgacagacagagttgaattagatgagaaaacttttgcgggggaagtagagcgaatcactgcgacgttcagtgaagttcttggtatcgaatacgtaagcccaggtgataactttttcaagcttggtggcgattctttcgatgctgtccgcgtgatgtcgcgtctgggtggcgatttgcagattgttgccatctttgagcacccaaccgcagaggaactagctaggtacatcctacataattctattaggcgtgatgtgcgactcgtcccgctacacgacgagtctacagccgatgggtcgattgcagtggttgccgtcccgttcggtggtggcgatccgaccgcataccgagatatatttcgcggaaatcaggacgtgcgtgtctttggggtggacttcggtgacttagaagtaaagggatcatcagatttttctgaattgattaacaaaattataaccgagattggaaaaatcgaagcagaccaactaattatttatgggcattgcgctggagcagcaactgcggcctgtatcgcttcatctatatcacccaaagtcagttccttttccttagtggtcgcagcatcgcaaccaataaataatccagacgctgcattacgcgaagccgagacgacctcagattatgaatggggccaatatctgcggtcattgggggcgtttgccgggctgaccgatgaggaggtcgatgggatgttagccaggggcaggagggaccacctaatagcgacagaggcatatcgagcgttaacactccttcaagcacgtggaatgcctgcactggtgttgttaggtgacgaagatgcggctacacctcaccccaatgacgtagtgaataaatggcgaagttttatggatgttactaagtcagtgattatacctggcgggggacactatttcatacgtacccatgcgcaagaggtcgctgatatcgttctgtcgttcgcagcggataacaggaatggagggaaatgagatgacgattaaaaataaactgcttgggagccaagctcacctgctacagcgaggcttgacagacctagggatacaagaccccgaactggagagcatcttggatgccgaagtaaggcgccagcatcgaacactgtcactggtcgcctcctgctgtgcagtcacgccccgagccttggtagcgtcagcttctgccttggtcaacgttacggcagagggaactcctggtagacggtaccacgcaggatgtgagaacgttgatttggtcgagtctctggcaatccaaagagctcgtgaactgttcggtgcccagtacgcaggcgtccagccacattcagcgtcgagtgcgaactaccaagtgctttcggcactacttcagcccggggatactctgctcggaatgaatctcgatcacggtgggcacctcactcacggtagcccagtcacattttcaggcacgtattaccgggcgattggatacggcacgactcctgaaggcgtcattgattatgacgaggtgcgtagactggcccacgatcatcgcccgcgcatgatcatctgtggtgcgactgcctattcgcgggtcgtggatttcgagaggttccgtgagattgccgatgagataggggcgatcttgctcgctgacatttcgcatatcgccggacttgttgcgactaaacgacacccaagcccgattaacgctgcacacgtaactacaacgtgtacgcataagcaactcgcaggaccacgtggtggtctgattatgtccggacgtgatgctaaagaaaaggttcctggcaaggagacaaccttcagccgtgctttgcaacagtcagtatttccctggatgcagggagcgccagccgtcaacataatagctgcgaaggctgctgcgttcggctatgcaatgtcacaggagtttgacgcatacatagagcgaattcggaccacagctaatgccatagcaagtgcgtttcaggaaaaaggctatgatgttataggaggacgtactgagaaccacacaattctgattcgtttgcatggtgccattactggtgccatcgctgagtcggcgctagaacagtgctcgattatagtgaataaaaatcgtgttccaggagagacccggtcgtcattcgtcactagtggattgcgcattggtaccggttccctggcgcaacgtcgcgtcgacaaacaggggtgccgtcaaattgttgatttagtttgccggatcttagacaaagtgacaccgcttggcgataaggagtacgaattggatccaactttgagggagcagtttcgttcagagattgaagcgttgtgctcaatttatccgcttatagattatacggagtgatgcgttcaggagtaaggaaatttgaacgtaagctgctaattaaacgaactgaatataaacaagtttttatgcatgctcattgttctgatcccaaatcgtggtgctcgaccgattttgaaggaagtaggtgcgaactagcccgttttgggctgatagggcggtatgttaagcgtccttttcccaatcgggactgtctaggttgcagtcctacagattgattccactcaaaacgaggattgcgttaaagtcagtgaaaactattgttaggaggttaatgcatggaagtatcaaaaataactgccaggttctgtctcaacaccaaggtgagaaaatggtgagcggcaaaacgtactgggatgagctgcctaacgagctcctagccgaatggattgtgtcagaacattttgagcgtttcgaagactcaactctggctgaaatcgcggaggcatatatcggagtttattcaactcggcctactagctggctagccgtcctagcccgcaatcgaagtattgatcgaaccgaagttctctccatggaaactgatccagctttggtgcgaataccaggaatgcgacgttcaaaattcttacttccccagtctctggcggctacggtttttggtgttacccgtctatctcttgccgaccacgagtggcggttacgcgatgtcaagctcacattggccgactatcggcgaatactaccaagccttaccgagctcactacaggctctcctgtccggctaaaagatattggggatgccttgggattgagtggcccccaggcccgcgcgtgcaccactgtcgcgacatatgatggagcattaattcggattccctcgtcgaatccttggtccaatcggtggttgtatacctccgcgcctaacggtctgcttcaaagcgatgatacaccaattgaccgtgaacgcctacagttggacatcgctcgccgttatattcaaaattatgggccggtatcagtcgatgaccttgcttggtggatggccatttcaaagaagacagcgcgcttgctcttggaaagggccggagcatacgagattggatcaggaatttggctgagtgccaatcaaaaggataagtttgaagagttcgtattgcacgctggtcagcactcagctacaggcgtacggtttttgcctgcttgggatccgcttttgatggggtacgcgcccggctcgagacagcgcgactgcctagggcttaaccagattggtgggtacgacgctgcaggaaatgggcgtcctgtcgtgttaatcggtagccgggcggtgactacctggcgcatcatgagaagtggctccaagcgcttaatctcgctcgatctctcatcttttgtaggtaaggaacgaaaagatcttcaagaatcggtcttggcctgggcaaaccaaatcggagccatttatgaccacgaaacgaatggggaagagcctacaactggggagtaatcattcggatgttggaaaattttaaacgaaacacactgcaatttatattagggagtgatcattcggatgtcggaaaattccaaactgaacacacagcaattggaaagtggattgatgaaggagattccaagtattaatcggtcgatatgggacgcattcgaacgctatgcatccggccagtcaacaatggctgagcgattggaagaggagatttttttacctgatgggcttactgcatcgattgacgatcttattgtggtcgcctcgatactgggctcgctggtcagtcccgaaggtcgggtaaccgttgggatacacgccaatggatcagcaacttgccttgaggtcgatgcgaccaaactgctcgatgctgatgacgctcgcacttacatctttgatctgcgccagaccgcagaactaccaagacataatgtgtcagttcctatggacattgaggtgactgatgggcagagctacccaattgcggagtcactggtatggttattagttcaagatggtcggtgtgttctgtcagtgcgggaagaccgaattgagaaggccatgtttatgcatctatgcaaaatcacggcctttgcgtgtgccagggccttggatccaaaggcaattcccgcgcttgatgccttacctacccacactacacatgaacagcgtcagcgtaagtcgctggtcgaacgcatcttcatacacaagcagacgaagccaatggacctagcgatcgtggataacacgagtggccaaaccttgacctatgccgaactttgggatgcatctgaggcaatagttcagcaggtgagcgaacaagtaaccacaaatcagtcacatttcagactcgcgctcttcatagaacgaggttggagatacttagtctctatcatcgctgtccaacgtatgggcggtacctgcgtgctgattgactccacgcatcccgatgatcggatacgagctttactagacgaatccaaacctgacgccgtaattactgcaggcaccttgacagacagggcacgttgtctaggtgcataccccgtgctggacttagacaatgggctaattctgaatccgctagtcaagtggggaggtggcgagtgggtcgaaactaaaaatgaagtgtgcttcatcgctggaacctccggaactaccgggcgaccgaaggcagcctgtctatcctaccgtgggatggcctctacaattgacgctatcatcgacgctgccaagctagggggaaacactcgaggttcatggctgtcgtccccaggatacgggatgatcgaagtagatccgctaccggtgctatgttcaggcggaacggtctgcatcccctcatctgatgtcttgcaagatgtacgaatgctgacaaactggttcatcaagaacaatgttacgcacacattggttatgacatcaatcgctgaaacgctttgggctgatggatggcaaactggtttggacactatgttaattgctggtgagcggtgcaagcagtggccgcctgctgatctgaattaccgagttttcaacgtctatggctctgcggaagcggctgttgtctcagtagaggatttatctggtcctcgtcgcacattgttgcccacagtaggacgggcggtgcctggtgcaaacatgtacgtggttgatagtgccggacaggagttaccagcttgctgcgtcggggaactaatcatcactggtgaaacgctttcgacgggttacatagattgcaatgagactaaaagatctttccgtccgaacacattcgacgaaacttcaccgctgcaatacatttccggtgaccgagcacggataggtttggatggaaccgtcgagatttttggcagatctgacgcacttgtgaaaattcgtgggcatcgggttgacttagctgaagtagagattactgcgcttaaagttccaggtgtgacaaaagccgctgccgtttgcttcaccgatgatgctggggaaatactggtacttttccttgagcagtcttccaatgctaagaatgttaagggtgcggtacgtaagtatcttagggaacaattgcctcccgctgctcaaccgagccagatcaatacgatagtgttgccactaggacgcaacggtaaggtagactataccgcgttacgcgactatcagttcgagcgagatacaacgcacacagtctttttcccgactacgaaaaccgagatagctttgcacgactgctggttgaagtggactcgatgtgatgaggcaactcttgagtctaatttctttcactctggtggagactctttgcgggctatgcgcatgatgggtgaattatcttgcaagtatggtatccacattgagatgagtccttttcttgagagcccggtattatcaaaccttatatgcttggctaatgcttctctcaatgtcgatttgccagcatttgagcacctgccaactgatcaacaattagagcccttcgagctaaatgaaagccaacaggctttatggattgggcgcggctctgacttcaactacggcggtgtcgggtgtcaaggatactttgagtgggaagtggagaatttagatcatgatcggtttgtgcgcgccgtcggcttgttggtagaccgccatccaatgcttaggatgacaattgatgatgctggtcgccaaagaatcaatatagtcgatggaaggcaggccgttgagtatatagatctaagtgagctttcaccggtcgaggttagcaacgagattaaccagttgcgtcgacgtatggcaaacgacgaaatcgggacaacgcagtggcccctattccgatttgtcgtgagccggattagcacgcatttaagcaggattcatttgtgcattgacatgctgatcgccgatgcatggtcgatcttccaagtaatcattcctgatttgattgacttttatattaatgaaaagtcacaactgccgcagctccagaccacattccacgattatgtcgcgtatcggaacaagctaaggcagagtgcacaataccttgcgcaccgcgagtattggttagaaaaaatcaaggagttgccagctgctccaaagttgccgcagctcgaaccaggggagactacagcgcctgtaaggttcgaaagacatgaaggcaagcttgaacaagagtcttgggctcggctcaaagctcaagcccaagagagaaggatatcgccctctggggttgtggctttagttttgtgtgaagtgttacgttgctggagcgaagaagatcggtttacattgaattttccggtctcagaccggatgccggtcagtgatgacattgatttagtggtcggggattttacgaatacattgcttgtcccttacgaaactgaggtcgaagatacgtttgaagctcgtggccgacggttacaggatgcgatttgggaggcacttgaccatcgactttttactggggtagaggtattgcgtgagttggctcgaatccgccgctctggtcgtgaaccactgatgccagtagtattgacaagccttctcggacatccaggtcgacacgatgtttccctgttgggtcgggaggtattcggggtttcacaaactccacaggtgacgcttgatgtccaggttcgagagtcagagggcacactgtatttcaaatgggactacctaactggagtcattcgacctgacgtgattgaggcgatgtttggtgcgttcagtaatctgctgcaacagcttgcggatgactccgaagtttggaaacgtacttggctagatcttcgaccagcgtcgcagatagctgtacgaaacgaggtcaatgcaacggaggaacctgttcccgaagttcacttacgtgatttgctactagagcgcctcagagatagtgcgaacgaaccagccgtcattgatatccatggtgaatacacctgggatgagattggtcgtgcagctacgcacgttaaaatgatgatccagcgggtttgtaactcaagtgatcggtttgtggggatcatgctacctaagggggtcgcacaatatgaggcggtttatggttgtctgttggctgggattggctacgttcctatagatatcgatctacctcaagagcgggtgcgtactatactcgcacaggcaggagtacgcattgtgattgcatcacctgatactatggtgcctgttggtgtccacaagatcgaacacgcgactgctggccccggtagttggatgcaacaaaatactgactttgttattgaacctgtctcagaagactattcaccgtatgtaattttcacatcaggctcaactggcgaaccgaagggcgttgagattccggaagccgctgtggtaaaccatattttcgatgttgttgaacgcttcggtctggataagtctacccgacatctcgccacagctgcactacactttgatatgtctgtcttcgatgttttcggccccttagtgcatggaggttccgttgtggtacccgaacctgcagctggccctactccagaagcttggctgagactacatcgccaatgtagggtgacattttgggcatgtgtccccgctgttatggatctagtatgctccgtggctgaaacagcgcttacggtacacccgattgagtctgtaaccaatatcgtgatggctggtgactggatcccactgtccctactaccgcgagctaggtctgttttcccgtctgctcggatgtactcatgtgggggcccaactgagactacaaactggtcagtaatccatgaaatcaacgaagacgaaggtagtatctgtcgttcggtcatttatggctccccgatgcggaattccaaatatcacattgttagcgagaactggattgaccgccctgactgggtgcctggcgaaatgctggtagaaagtgatatatcattggcacgtgggtaccttggaaagcctgaactcacgcagtgcgcattcgtttatcaccctcggaccggacgccggatgtaccgcacaggagacttgggccgttaccttcccaatggtgagatagagatcctcggacgtgtcgacaaccagatcaagataaaaggaatcaggatcgagcttggtgaaatcgagagagcggccgaagcctgtgacggggtatcgagagcgtgcgccgttgcattgcctggccaagatggaaggccaaagcagatcgggctagcttatatcggagaatccaatctcgatgatgcaataatcaaggagctcacacatcgcttacctaactacatggtgccaaagactattaaaaaagtaccgaatctacccctatcaaaaaacggaaaggtggatgtaagagcattgcgtgaaagattattaaagaccgacacaaaagagttaaatactggggatcgaagaaccattctacgagaggtcatacgcgtgatatcggcccaactcgcccaaccagtaatactaccagaggacaattttattcaattaggtggagactcgctgaccgctatgaatctcaaaatcgaattggagtccaaattatcgataacagtttcacttgagagcatcatgctgactgagacgattggtgagtttgccaatgagcttgcggaaaggatgaagctatgaacaaaaaacaattgtatctagaatggccggaatatgtagaggcatatctgaatggacaaactaaactacaagggttacacgagaaggttgagttgcgcgggcaagaaatattagagtacgttgaggtgcaatcaccattctaccgtgaacatctgcgtacccaagtgggtttcacaagtgagttcaaggttctggatggaatacctttcactaccaagagtgaccttcgttctgctggtacggaggtctgttgtgtcccgatggatgaaatcgctgcgtattatgagacgactgggactacggggaaatcaacgccgtgcccacgagcttcaattgacgtcgagactagcggggcatacgttcagaatgctgttaaggaggtataccaatcaacattcggtacgatgcatgctctcactgcaatcatggggccatcagagttatatgccttcggggatacgtatggtgaagtatgtcggaatctaggtattccattcgtgcggttatggccggagagccctcgagtcggtcttgaaaaagctgctgatctcattacgggtcttggtgtaaagtcattaatatgctcacctgctgttgcccttgcccttgctcggttctataagagccttggaatcgatccctgcaagactccggtgagtcagatccttgtgttaggagagttatgcactcctgagatgctttcaaacatatctcggatttggggtgcaaattgtactcatggtctgtatgggtcgcaagagacacatgcagtagctacaggttgttcagaaggaaatctacatctttctgaaacgaactatattgttgagactataccgataaatgggcttgatggtgatgtaggtgagttgtgccttaccatgctcgtccctggtgctaagccgttaatccgatttcgtacaggggatttagcaagcctatacccgtcaagtgtttgtgggtgtggaaatccgtcccgctgtatacggatatttggtcgggtcgacgacgttatgacaattggtggcttccagatgtttcctgcttcaatcgaatcggctgttttaagggcagccgatagggtttggggatatcaggtcgatatcaggatttcgaacaatggcactgacgaattagaagtagcgatggttgctgaggtcgggaatcagtcttttgatcagattcaaaaggagatagcggatcattttggtgtcccggtaaggttggtgttgcaagatcgtttggatccgcggacggagactggagcttatatttcctggaaacacgcccgaatccgagattggaggccgacactatgaatacgcaagaacagaaagattcatgggtcgtcgagcaaagtgtggttcctgaagccgcgccggtagcacaagtgcggcggcgtgtattaagtttataccctcgatcggccttatttgagacggggactggttttcaagctgtcgatggtaaacaaacaatgttcatggttgatttgctgtttgagctcatactagtagatggcacttggcaagtattcggcagtggtccttttgagatgaaaaccagcgaatgtagcgaggtagttaatgatcacactaagcccttatgggagcgcatgagaaaggtgacacagatccttgcgttgccggagggtttcccgctcgtgttggttctggggtatagtgcagctcgttttgttgaacatctaccgcggatagctattgaaaagggagaaccggaggtggtattgcgcgtctacagacacgtcgtgcgctacaacggtgctgaaggaggtgcccaagtcgatgtattgaagtgtagacacgatgaggtcacagataccgaaattttaatcgcaactcttaccgatcccgaaatagatctggctccacgtggtccatgggatttaggagttattcagggtttaacggagcggagcaccttctgcgatgcggtgaaccgtgccaaagaacatattcgtgctggtgacatctatcaggttcagttgtgtcggtgcgcaatatcgagtgcgaggattcccccattagacctctatgaaagactcgcatcaattaatccggctccgtacatgtattacttggaccttggcgaccggcatgtggtgtcctccagcccagagctcatgatccgtagtggtgatggtggtgctcaagttcgccccatcgcgggaacaatggcgcaggaagatcagcggggcagtcgcttggaccacattcccaaagaggcggccgagcacctgatgcttgtggatctggcgcgcaatgatttagcacgttgcgctatcccaggaggtgtggatgtaacctcgtttatgcagatggatgcatacggtccactttttcacttggtctcgactgttgagactccggtccgtgcagattccgacatatgggacttgattgaagcaaattttccggcgggcacaatgacaggtgcacccaaagtccgtgcgatggagattatcgccgagctcgaagatactgcacgagggttgttcactggttgcgctgggtatatcaatggagagaacagtggtgtgcttgccctgaccatcagaacaatcgtcggtgactctggtcgctacgtattgcgagctgctgcgggtattgtggctgactcgaaggcatcggctgaatgggacgaggcgggagcgaaaatacggtcgtttgccagagcgataggagggagcgtatgagagttttattggtagatgcctttgatagctttgtattcgtcattgcacagtattacgcaaaggttggcgcacacacgaaggtggtacgtgtgaatgatgacccaataagtcagtaccagcggtggaagcctcaacttctagtcctggggccaggtccaggaacaccgcaggaacatggatacccagaaataattcgtgcagcaggtgaacatcaagctatattcggcgtctgtttgggccaccaagctattggggagttttttggctgtaagctcaaaaatgcacctactatcgagcacggcaagaaagctcaggtgcaacacgacggacaaggtatcttttgccatgtcccatcgcccgtcactgtagtccggtaccattcactggctatcaccgatcccggtacggaaaacgaactggttacatccgcattttctcaagaagatggcgtggtaatgggggtgcgtcatcgtacgagaccaatcgaaggtgtgcagtttcaccccgagagtatcggaacggagcacgggatcacaatgatacggaactcgctggcgttggctaactaccctagcttaatgtcgagctgattacttcggccagattataccgacaataattcttttctagttctttcttgttggaaataacataggtatagtcctagggttggcttattctaactgagtatagcggtggatcaggtctaaacaatgggatccacctcagattatataatgatgcaattaccaaaaagattggagttaaaagaaatgatacagacatcaaaaaacgaaattgaagtgataagtgaggtgcgatggaaggcccttgctgttatttcgatcatccagttcatactattgcttgacgccactgtggttaatgtggcattaccgcatataaagcaggatttaggattcactgctgcgtccttaacgtgggtggtgaatgcttacctcgtagctgccggatcgctgctactgctaggtggtcgaatcggtgatgcctttgggttgcgacgtaccttccaaataggtatcgcagttttcggtgtattttcactcgtggcaactttatcctctaacgcgagcatgcttattgtaggacgcgctggtcagggggtgggtgaggctctcactgctgcaactggtttagcgatggtatccttattgttcccttcaggccctgcacgtggcaaagcattttcgatctgggcggctctcggtggattcgggtcaatcgtcggggttatgctatctggtgtactaactgaatatctgtcgtggcgctgggtctttgggatcaacatcccaatcatcttgatcctctatgtgactgttgtgctgttggtcccgaagttatccaaccaggcaaccgcgcggttggacattggtaatgctttggtattggcattttcggtttctgtgatagttttgggcatcattggttcaggcattgagcagctattatggctccgcgtcacattgtctctcttgggtatgctcggcatcatcggggtgcttcaacgttgcaaacggtctggtgacggcattatacccgcccggctaatggctcgttcgccgcggatcattggttatgccattgttgcaatcttagccggtacatctggtgctttgttttaccttggtgtcctactattgcaagattcccttggcatgaccccaatgcaagcaggtatggcttggctgccattttgcctcggctttttcccaggcttattcctttttcagtttattataaaacggtggagttcaagggcggctgctcttgttggtctcacagtctcagccttaggtttcttactgtttgcagttggagtaactacacaaagctactgggttgggatgatgccagcaatgattgtgacgtctgtcggctttggctgtgtttcaccagtctctcaatatctcgcaactttcgggctctctgaggtggatgcaggagccggttcaggcattacgtcaacgatccagcaactgtttaacgtagggggagtgacccttcttgcggccgttgctattagtattacggacggtactggcgcatctacaataatcaatccaaaaggattcattgtttcattcgtgctagccgctgtggcaataatctgcggggcagttcttattttggttagagggagtgctctagcatcatctccagacaaccaggagagcttaaccgatggaagggaatcatagggcagagggggtttccctaggtacagccttttgatcggggcgtaaagtagatgcatcgtcaaagatgaccttttgggcttatatctgtgagtcaaaggcaaaggatccaacttttaatggaaaagttgaggaaatgcgaggacatctgtaacagccgagtctgtagtagcaaaacgcccgatacagatagtttcagcaataagaaagctattttttggtggatgaatagtctgacttgatttgattgatagcgttgatctgaaaggctacgaaaaagcgagaaaaacgaagaaaatatttaatgagagaggaggatattcagatgcagcagaaatacctagtcccacctgtaggacgccagctcataacagtccctagcacggcggggctacgtgaaaaatggatcggagcaatgcttgacaaaacgggccgcgcctatgctggagcattacgcctcgacttctcaccgagttgcgaatcagataaagctctcaacgctgtagctgatacgttggcccggcatccaatcctagccgcccacttccagattgaaggtgacatccttgtcggttatgcccccacagagtctagtctgcgtgaagtgctcagggagcaaatgcgcaccaagcacactggtattactaatgaggcgtttcttgcgcatcgtgcaagacaatctagtgagccaggacttaggctagcgtcagtttcggatgataatgggttacacgtgtggattggattttggacctatacttgcgatggggcatcaatcgacctactaatcgaggaaattgctaatcgctaccttggcaagtccttgaaatcgtcacggagctgggaggagtatgcccagatggaggtcactcaaacagtaaagcaagtattagactcacggactcgggttaatgtttaccctgtgccggggccatacggcattgatgcagttcgcgccactccgcgcggtactgtaggacatacacaaagtgtacggttcgactctcctataccacgtagcatggttttaacctgcgcgagagcctaccgtgttacaccattcgtactattattcgcagctttccagcgtgcggtaagtgcggtgagtggagtcaaaaccgttgttaccggagtcccattcgcaaaccgtcggcatcctgatgatcacaccgtggtcggtcccctatcgaacacagttccgatcacaacccaccatgagctgggggaaccgctagccgcggtgcttaatcaagtgcaacgcgcggtgattagagcagctgaacgccagaatatcgagacgactgcactctatcccgaaggtacctcacctcggaacgtggattatgaccttcctttcccccagttgttcaacgcatggaactctcaacgtgatggaaccgagatctctctgggtaaaacggaatggatgtatctccgtctgctaccaaacggtacgtgtagggcaggcttcgaaatcactctcgatgagcactctgaatatatttcaggacggatcgatatggacgtggaagcgtacgacgggcaagtcgagcaggtaattgaacatatgatcaaaggcttaaatagtctcaattcaaattagggtattgctctttgaagtatacttgttcgacattctacaaatggcatacctcgttgcatgcttggagcgggagaatataaaagactgagatcgcctgaggttttgtaacaaattttaggtcgagccagttttcccaactatagaatatcccaaataacgtaaagaattgagatctgaaagttttttaccaataaggagggggtcaaatgaaagggcgcgtagcaattgttactggtgcagcacatgggatcggacgtgccgttgcggcacagttagtgacaagtggatgtcaagttgcgttactagacaagaatatcgacagccttggctcgcaagatggttcgatgcgttgcgaggttgatgtcactaacagtgaccaagttcatcaggcattccagtctgtaaacaaagaacttgggcggatagatattctggtgaacgcagtgggtggaagtcaacattcgaaattaatcgagacgatagaggatagcgactggaacacaacgtttgaattgaatttacgaagcgtgtttaattgtacgcgtgccgcaattcctgatatgaaaaagcgtgattgggggcgagtggtcaacatcacggctgttgctggaagaacctacaccttcttcggtggagcagacttcaccgctgccaaagcagctgttattggttttacgcgacaatgcgcgtttgagttggccccctatgggatcaccgtgaacgccgtagcccctggactgacgctcactgaacgagtggagtcaatgtgggcggaatacaatgaggagaagcgagcatcgatcctagagcggatcccgattggacgcccgtctactgtgcaagagcaggctgaaacgatctgttttttgtgtagcgagcatgcctcttacatttgtggcgcaatacttgatgtcaacggggcgatgttcgttggctagttacgactcaatagaggagaaatagagagccatctatcgtgtggctatttgtgcgggggtagtgtatagtgccgcatgaagtatttagacaagtataagaaagatgctaaagacaaggacttgaagatttggagtatgagtggatatgcgactgaaaaagggtttaatggttgtgtaactaaactgaaaaaatcagtaactgtatctaagccggttcaaaaatcagtaacaacacaccgatcagagatacataaatcccaactcgagtagttcacattcaaataattcagcatcaagtagctcttctaactctatacaagctgcttcctctttgactgacggaacagattactttgcaaactgtacagagttgagaaagaaatatccgcatgatgtaccaagtactcaccctgtttattcatctaaaatggattcagatcatgacaactttgtgtgtgaaaagaattaaaaattttgaagcctcagaggcttcttttttatttggatgtattcagctcagtcgtgcagaaaaggcttataagaaatgcgatcttcatatcaatcagatcaagccagctgtctatcgctggcgtagtctggaaaaaacttcgatgttgtcggcgcttcggccagagaagtcattatcacctaggttagccataccgtgaaacgttctcttaattgactatctggccacagagattcttggattcacccgcgcgttgcttggctgtggccagcaggctgtttgcttcgaaaacactcatgaccaatcatacgataaacttcaacgaaatattaacatggaagaatgaagaaacgaactgaaaaatgctggggtagtcaaaacttcacacggtctgaatccctgtgcatcaaagatttaatctgtccatagcatcactttatttaaagagaggagatatcggcattatatcgcatcgtctttttctctgcgattaactagatgaagtatctatagacgtaaaaacacatctatgtaactgtttttttctttgaaggaaaatggcattgtttgcagaaatttataatggatgtgtaaaaaaatcgggataggggttggcaaatataaatctttcatatctaagggtcagtaattttagaagtatagaaaaaatagaagttgatttatttgactttacaagtttaatagggcctaataactgtggaaaatcttcaataatacgagcaatcgaaatttttctaaaccaatctaaacctagtattgatgagtggagaaaaggttttgaaaatgaagaaataataatagaaggtgtatttgataatatcttagactgggaaagggatactcctggtgttgcggggttggtgaatgatggtaaaataaaacttcggctaagagctagtttaaaagatggcaaggtggaaagtttctatgaagcatacataaaacaatacgaaattaatggatttcaggagaagtggagcgagaattcgcatacaattaaacaaatagctacttcattaggaattgacggaacaaaatggaggacgaaagcgaatagagaaagagttaaagaggagataaaacaaacaaatccagagttaatgactctctctgaagaggattggacttctgaaaatattagtattgccccagctttaaagcaggctttgcctaatgcagtaataattccagctgttaaagatgcttcagatgaactaaaaccaaccaatactacgatttttggtacacttttaaaacaaataatcttacctgctattcaaaatatgaacgaatatagaaacctgatggaaaatgttgaactcctttctaaaaaattatccggtgaattagaagaagagacaccgattatcagtcaattaaccaacgatatttcaaatagaatgtcttcaatcattgaatctaagataaagtttgcaatgtccactcccgatacaaataaattcgttggaaattatacaaccctattaatggacgatggcgtggagacaacgattgaaagacagggacatggctctcagagggccttaatatttgccttaattgaagttcttgctaaccattcttcaaagaatacttcagaagaaatgactaggtctacaattttactctttgaagaacctgaattgtaccttcatcctcatttaatgattagattgaaaaatgcattgaaatatatatcaaagcaaacccagtggcaagtattaatcagcactcattctccttttttgattgatgtcgtagaaaatccaatgtcactagctattttaaatagaaaaaattcgagtgaagccccatatatcaatcagttaaaacaagatccttttgaaaagggtatcaatatagaaagtgaaaaaaatgctctaagagcttctttagattttcaccctacagttaatcaagctttctttgcaaaaagagttgttttagttgagggcgatactgaaaaaagtttatttaatcatagattaagggttcatgaacattatgaaatatctgaggaagtatttaatactacaacaattgtttcttgtggaggaaaatggactattgtgccttttgcaaaattgctaaaagcatttaaaattccatttaggatcgtacatgattgcgacagaaaggataggacagatgaagaattggagtctattaggggcatagacccttataaggctaatgaacagattagaattgcagctgatggagaacaaattttcttagttgaagataccctagaaaatctcctttgggagaaggggactaagattccttcaaaagataaaccctttcgaacttggaaaagggtaaatgatcttatggaaaaccgagaagaattagagaaatttcctaggttgaaggatttatttgattttgtatataaatggtgaaattatctgcgggttcatgaaaggtttaaccaaacagcctattgttacccatagtaattagtgtagtagaaaggattaagattatccactgtgaatatttatattgagtatataaacaaactatttctaatttgctctcatatttactgtagttaaacaaaagataataagcatcgaaggactgcaagctgataaacgcattaacgattgctctatcattatttaataaaactttataggaagaagatctggtttatgggaatatatgtggtgtcatcgaccgaggaacaagtgatcaagcattaacagccagatcgaggcctgtataaaaaaagcagggactaaggatgtgctgcagtatgccgttgatggattttctgcggagcttttagaacgtccggctttgaatcactggagggaggatacaagataggacttataagtcaggtcgttttttacgaccctgaccgtctttctcggaaatagatcattgagccatcaatcataccgcaataattagaaaaatgattttcataactgtcacatctctttttcaaatattcttccttattgaaaagaaaatagaaaaagccgggatgtcagatccggctttcgctcactttcccttcttcttccgcttctccttctccgcccgataaaactcatgaaacatcttcatcaatgcgcgtttttcaatccgcgacacataactccttgaaatgccgagctcctttgcgatctcgcgctgtgttttttctttttttaaatcaagcccgaagcggccgacgatgacttctttttcgcggtcgtctaaaatatcgatatattttttgaccttttcaagttccatgttgagctgaatggtgtcgatcacatcttcgctttccgacttgaggacatcgatcaggcttatttcattcccttctttatcctggccgatcggatcatgaagggagacgtcttttttcgtttttttcaatgcgcgcagatgcattaaaatctcattttcaatacatcgtgcggcatatgtggcaagcttcgtgccttttccggctgagtagctttcaattcctttgatcagcccgattgtaccgatggagatcagatcttctgcgtcctctcccgtgttttcaaattttttcacaatatgggcgactaaacggagattatgttcgatcagcatgttgcgggcgtgttcatctccttcagccataaggtctaagtattttttctcctcattatttgagagcggttgtggaaaggcattatttttcacgtatgatactaaaaacacaagttctttcacaataaacccgagcgctgcaaaaacacctgtcaccgtcctcacctccacaaagttatgtaggcaatcgcctatatgtaactgtatgtgtcggtagggctgtttgtgtctgtacagggaaattaatcaaaatccggttttatttcttacagcctcttgatttttgctgattgagcctgtatattgttaaaaaaagtaagggtgaaaacaatataaccgaaaagcgctgaagagacgagtagacagatatcattcatgacagagagctccgggagctgtgaaggagtatgaatggatgtgttgaaacaaacctcttagcttcgcatcggaatcatgcaacacgaggatgatgcggcggatactcctgttaccgagtaagctttgtacccggcaaggccggcaccaaaccgaattgaggtggcatagcgggctgtttcccgtcctcaagactttattgtcttgagggcgttttttatttctaagggagggataagatgaaaaacctgaagtcttggcggtacccgatgcttctgttaaccggaatcgggatatcaaatattggtgaatggatttattttttgtctcttaatcttattgtcttaaaagaaacggggtctgcttttgcggtttccatcctttatttaatcaggcctgcggctgttttgatgacaaatgggtgggcgggcagcatcatcgaccggtgcaacaaacggaatatgatgatgtcgcttgatttcatccgggctgcactcattgccgttctgccgctgatgtttactgcacggtctttattttccgtttattgtatcgtatttttgattcaaatggccaatgcgatgtttcgtccgtgttccatggcgtatgtgacgatgcttatcccggctgaaaggagaaaacgattcaattcactaagggctttgtcggaatcaggggcttttctcctcggaccggctgcggccgggctgctttttattgccggcacgccgatttttgcgatttgggtgaatgcggcggctttagtgctgtccggtttcattacgatgatgctgccgaaccttgaaaatgagcctcacgtacattctcccgcacagaagctttctttggcagtttacaaacaagattggaagctcgtctatcgcttcagccgaacagcgcgtaacgtcatgatcatttattttttattcagtctggtcatgactgttatgccatcagcgcttgattcgcttgaagccgcttttgcaaaagaggttcttcagctgactgatgccgattacggttttctcgtcagtgtctcaggggcagggattattgcgggggcgcttgtcaatgtgttctttaataaaaaaatgccggcttctttattgatgggaatgggctctttattcacagcggccggatatatgatttatgcgttttctgacgttttttggacggctgctttcggatttttcctactcgctttttttctggcgtttgccaatacaggctttctgacgttttatcaaaagaatgttccggtggacatcatggggagagtggggagcttttattcattagtcgaagctatcttcattatagtggtaacggcggttttcggagcggcttctgtcagttcttccgtccgcggcattgtcatcgcaggcgctgctgttatgctggcgttggcagccgttttatgctcgttcttatttgcggccgcaaaaaggaggacttctgatgtatttcaagcggatcaatttaaacaaacataaagagacggccgtttcatttcgtgaggattcgtttttcgtcagtttttcagagcgaacggtgtttcggaatatcacctgagagtttcgccgggcaatgaggcggctctgtcattttacagaaagaaaaacatggaagtgatcggttcagaatgtaacggaaaagttctcagaatgagaggagccgtaccgccggaatagggggcggtacgcgcttcattttttcgttgtttttaaaaggccgggaaacttcttataaatgaccgccattaagacgagcatatacattccgtaaatcccgaaagacagcagtttgttgcttgtaaatgaagcgcctgcgacggtcacgatcacaatgttcggaattttgccgagcaccgacgcagaaaaaaagatcggccatcggatattactcagcccgcagacggtattcatggcaagcgacggtataatcggaatcagccgcccgaaaagcaccgccgtaaacgcgtgctgatgaaatgaatcttcatattgggccgctgccgggtaagccagcagcttttttctggcccagtctctgaatccgtaccggacgagaaaaaacaatgccattgttccgagcatcgcgcctgacaatgtaatccacaccccgtttacaatcccgaaaaccgctccgtttaaggccgcgataatggcgaatggaacaatcggaaaaaatacgtcagctgcgaccagaaggatactcataagcacggcgtacatgccgcccgcgcgaatcatgctgagccagacgtctttttgcataaagccgatcatcacgacagcaataatgacggcaagactgaatcccttttttatcatctgcacgttcacctcttttcatttagtatacagcacaaatctatctccttctattaaaataagctgtccgataagcgtatttgtttatcagcatttgccgtttgatgagaaaaggctgcacccggatttggacaaaaacaagcgggaagcgggtgatgtaaatcatttgatgcagagaatcattttttataaaaggggacacgttaacagtagtgtttactggaggtgtaaacgttgagatgctttcatctgatcatcatgatatgcgttctcacgagtctcactgccgtgtccgccgatgcgaaatctttaaaaagaagtgacatggagaagacgggaaacgtgtactgggatataaggtctgaaaaaaagaaactatctttaaccttcgatgacggcccccatcctgtctatacggaggctgtgttagacgtgctgaaacagcacaatgttaaagcaacctttttttgtgtcgggagccgtatagacaaataccccataacggcaaaacgcatcgttgaagaagggcatgaaatcggcaaccatacgatgaaccatgtttattttcaccgtctgaaacgcaaagacattttacaagagcttcacagctccgcgcatcatatcacatcgctgcagccggaaggggacaagttattccgaccgccgggagggtcgctgaatcatacggctttcaaaagcatcttaaaagagggctatcatatcatcatgtggtcatggaaccaagacccgagagactggaaaaggcccgggaaaggaaaaatcgtcaggcacgttgtttcacatgccagagatggtgatatcgttcttctgcatgacggcggaggaaaccggcgccagacggttgaggctttgaaagaaatcattcccaagctgaaaaagcagggctacacgtttgttaaggtttcggatttgatcggacaggattccggtccttttcatatccagtaaagagagcgccgcgttgaaagccgccaaagagatgtgtaccataggaggtaaggtttggggggagagaaaatgaagtttgctgttctttttattacgataatctgtctgttatcaggatgcgccgcgggcaaagaaaaaagtgttgtcgcattcggcgacagcaatacgcgcggttccaactgggattatcgtgattatccgaaggcgcagcagtgggtaaacatattaaagacagcggaacgcggccgtcttacggttataaatgcgggaataggcggccagacgactgaggatgcgcgcctgcgctttcaaagcgacgtgctggagcgtaagccccaatatttatttatcatgttcgggacaaatgatgcgggcattttgacgggcgatcagccgcgggtatcaaagaaacggtttaaagaaaacctgacttatttcataaacgaaagcagaaatcacggcataaagccgattttaatgacgtgcatcccggttatagaaggaaacggaacgcatcatctctattactattcgagatataaagcctcagcctttaaagaaaaaggcggtgcgagaaaatggcataattcctataacagcgttacgaggcaggttgcagctgagttgaaagtgccgctggtggataactggaaacactttatacgcgcggacggcggcaaagatacagaccgggcgctgatccaatccggactgatagatccttccggaaatcatatgacgccaaaaggcgccagaatcttaattgaaggcataaaaaatgggcgggttttggaacgctgacgccgtcagctgcctaaaccgttttgcttctgcttcataggctgtagaaaaaacatctttttggaggcgattgctatgaaccgcggtttccctccgcaacatcctgtatgcccgcctcctcgggtgaatgcggggtactggtacgcattttttgttgtgctgctcgtcgtcattctcgtcctgggcggtctgtattggttcaatatatagcagccgtcctcttaaacacctctattttaggggtgttttttgttgaaagtggtagtaatgcgcataaccgaagtgatataatatcagtcatctgagtaaaaaaaggaaattcgcccgggaacttttttctgtttaagaagaaacggaaataatgtgtccgagcgatcttcttttgatttcgttttcaattaactcgataaattcacggctcaaattcatttcattggctttgaaataagattctattagtaattcatcagaaagctttctcatgccggggacccaattaatgggggtggcacctccttacaattgtaatcaatcatcagacgcaagcatatgatggaaggttgcgtttcaatcatggtgaggttatctttaatctaccatgaaatacaaataagaacaatcgttctgttatccacactcgtaagtggataacttgttagtatcttgtttataatctggataaatccggatgtaataagagtggataatgtgtgtaattttatccacaactggtgaagaaacccaatttttgtcgaaatttttttactgtgtccgactttgtttttaaatctgacaggtttcgacatatagatgatagaaagaaaaggaagggtgcgggttttgttaaaaaagttttttttacctgacgaatttgtgaaaaatatatttcatatcacaccggaaaagctcaaagaacgcaatgtgaaagggattattacagatcttgacaacacgcttgtggagtgggacagaccgagtgcgacacctcgattaatcgagtggtttgaagaaatgaaggagcacggcattaaagtcacgatcgtctccaataataatgaacgaagagtgaaattattctcggagccgcttggcataccgtttatttataaggcaagaaaaccgatggggcgcgcctttaaaagagccgtcagcagcatggatctgaaaaaagaagactgtgtggtcatcggtgatcagctgcttactgatgttctcggcggaaacagaaacgggtatcatacgatcctcgtcgtgcctgtcgcttcctctgacggagtcatgacgcgctttaaccgccggattgaacggagaatattgagttctttgaaacgtaaaggccatattcagtgggaggattagaaatggaaaaggttgtttgcatcggctgcggagtaacgatccaaaccgaggataaacaaggtctcggatacgcgccaaaggcatctctcacaaaggagaatgtcatctgccagcgctgcttcagactgaaaaattacaatgaaattcaagatgtttcattaacggatgatgactttttaaatatcttgcacacaatcggcgatactgactctcttattgtcaaagtcgttgatatttttgattttaacggaagctggataaacgggctgaaccgctttgtcggcggtaatccgatcattcttgtcggtaataaggccgatatcctgccgaaatccgtaaaacgggaacggctcgttcaatggatgaaacgcgaagcgaaagaatacggcttaaaaccccttgatgtctttttaatcagcgcttcccgcggacaagggatgaaagaagtcattgacgccattgaatattcccgcgaaggccgcgatgtgtatgtggtgggctgtaccaatgtcggcaaatccacatttatcaaccggattattaaagaggtctcaggggaagagaatattattaccacctctcaatttccgggcacgacgcttgatgcgattgaaatcccgcttgatgacggatctgcgctttatgatacgccgggaatcattaaccatcaccagatggcgcattacgtggacaagcgtgacttaaaggtgctgacaccgaaaaaagaactgaagccgcgcacttttcagctgaatgaaaaacaaacgctttatttcggcgggcttgcccggtttgactatgtatcaggcgataaaacagcgtttgtctgctatatgccgaatgaattgatgattcacagaacgaagcttgaaaatgctgatgccttatacgaaaagcatgcgggagaactgcttaccccgcccggaaaagatcatttggatgaatttccggagcttacaccccatacgttttcgattaaagaaggaaagacggatatcgttttttccggtctcggctgggtcacggtgcagcaagcagataaaaaaataacggcatacgctccgaaaggcgtacacgtatttgtccgccgttcattaatatagagagaaggggagagggagcatgaaacaattgtacggagtaatcggaaatccgatcgggcattcaatgtcacccgatattcataacgcggctttgcaagataagaacatcaacgggcagtattttgcgtttcaggtggaacctcatcatctcaaggacgccgttaacggaatcaaggcgcttggcatctgcggagtgaacgtcacagtcccgcataaagtcgcgatcatggagcatctggatgaaatacatgaaagcgcgaaagtactcggggccgtaaataccgtcaaaagagagggagacaggctcatcgggtataatactgacggagatgggttttataaatccttagtcaaagtattggacaaaccgatatcagagctctccatccttatgattggggcgggaggagcggcaagagcgatttttacgacgatcgtccgcagagagccgaaacaatttgacgtttgcaaccgcacgccggaaaaagcagaaagtctgattgcggctgctccctcttttcagcagaaacgcgtccttactttaaaagaagctgaaaatcagcttgaacaatatgacgtcattattcatacaacatctgtcggcatgtatccgaaaacggatgccgtgccgctctcattggaacgggccaaaacgggcgccatcgtttgtgatatcgtatacaacccgattcaaacggcgttcttaaaagaagctgaaaaaagaggtttaacaacccttgacggtgtcggcatgtttgtggaacaggccgcactgtctttcaagctgtggacggaacaagagcctgacagcggcttaatgagagcaattgttgaaggaaaactaggaggaacacaatgttaacaggaaaacaaaaacggtttttgcgttcaaaagcgcatcatttaacgcctatttttcaagtgggaaaaggcggagtcaacgaaaacatggtgaaacagattgccgaggctttagaagcaagagagctgattaaagtcagcgtgcttcaaaactgcgaagacgataaaaatgatgtcgcagaagcccttgtgaaaggcacccgctcacaattggtgcagacgatcggaaatacgatcgtattgtataaggagtcaaaggaaaataaacaaatcgagcttccgtaaggtggttgacatgaagaaaatcggaatattcgggggcacatttgaccctccgcacaacggacatcttctgatggctaatgaagtccttcatcaggcggagctcgatgagatttggtttatgcccaataaaatccctccgcataagcagaatgaagactttacagacagccggcaccgggtggagatgctgaagcttgccatcagctcgaattccggctttaagcttgagcttgcggaaatggaccggaaaggcccttcttatacctatgatactgtccgtttactgaaggagcggcacccgaacgacaagcttttctttattatcggggcggatatgattgaatatctgccgaaatggtacaaactggacgaactgctcacgctcattcaatttatcggagtgcggcgcccggggtatcatattgagaccccgtacccgctgctttttgccgacgttccggaatttgacgtttcgtcaacgatgctgagagaacgtctcaaagcaaaaaagccgacgcaatacttaatgccggataaagtgaggcagtatatagaggagaatgatttatatgaatcgtgaggaagcacttgcctgcgtcaaagaacagctgaccgagcatcgctacatccacacaatcggcgtgacagatacggcggttattctcgcaggccggttcggagcagacccgaaaaaagcggaaatggcggccatttttcatgattatgcgaaattccggccgaaagaagaaatgaagcagatcatcgtgcgggaaaaaatgccggctgagctcttggattacaatgccgagctgtggcatgcccctgtgggagcgtatctggctgagaaagaagcggggatcactgatcctgagatcctggatgcaatccgctatcacacgtcagggcgtcccggaatgacccttttagacaaagtcatttacgttgcggattacattgaacccggccgccattttcccggagtggaagaggtgcgccgtctggcggaaacggatctgaacgaagcgctcatacaagcaatgaaaaatacaatgatatttctgatgaaaaaaaaccagccggtctttccggagacgtttgcaacctataactggctggtgtctcaaaattgacaggaggaatttgaagaatgaatcaagcttccgtattaaaaatcgcggcaaaagcatgcgacgataaacgtgcagaagatattttagcgctggacatggaaggaatctcacttatagcggattactttttaatctgccacgggaattctgataagcaggttcaggcaattgcgcgtgaaattaaagatcaggcagaagaaaacggcattgatgtcaaaaagatggaagggtttgatgaggcccgctggattttagttgatctcggcgacgtcattgtccacgttttccataaagatgaaagaagctactacaatcttgaaaagctatggggcgacgcgccgctcgcagagcttgagctcggcttgaactcatgatttaccaaggcttcgccggcgtatatgacgagttaatgtcacatgcgccgtatgatgaatgggcgggctggatcgaagcgtctcttccggaaaagggaagggtgcttgatcttgcctgcggaaccggagaaatatccatcaggcttgctgaaaaaggctgcgaagtcacggggattgatttgagtgaagatatgctgagctgtgcccagcagaaaaaaacgggaaagccgattctttttctccagcaggatatgagagagctttccggttttgaagaacagtttgatgccgttgtcatctgctgtgattcccttaattacttaaaaacgaaaaatgatgtcttaagcaccttcaaaagtgtttttcaagttttgaaggaggacggcctgcttctgtttgacgtccattccccatataaaatgacggagctttttccggacagcacccatgcggatcaggatgagcagatcagctatatctggcaaagctttgccggcgatgaagagctttctgtcatccatgatatgtcctttttcgtatggaacggacaatcttatgaccgttatgacgagacgcatgagcaaaaaacattttacattgaagaatatgaacaaatgcttgcagagaccggatttgaactgaagaaggtgacggctgattttacagaccggcctccttcaacagagtctgaacgtcttttcttcacggcaggcaaaccaaaaaccatcgtttaaacggaacgatggtttttaaaatgcattttttgcgattggcgagataaagcactttatggcatactcagttacacgtgaaattgcttcttcactaacgatatatcttcatcgtatttgtcatgtgtacgctgaaagacacggttgaacatatcctgaacaccgctttcgagagccttcagtccttccccggtgacgccgccttttacgcatactttttcctgcaaggcgggaagtgtgtaatgccctgtttccagaagctttccgagaccgacaagcatttccgtcgacattatcacggcttcttctttggtgatgtccgtttcttccactgccgcgtcaataaagcgctgaacgagataactcataaaagcgggcccgcagctgacaatgtctgacgccgctcttgtaatgccgctgctgatttccacaggttttgaaatatgagtgaacagcgtttggatatccgcttttgcagactcgctgcagcttttgccgaacgtaacaagcgagacgccggccaaggcgcggttcgtaatgctcggaatgacgcgggccgtctgacacggaaccgtatgttcaatctgatccgtctgaacgggactggtaatggagattaagatgtgatctttccgtaaatgcggtgtgagtttcttcagcaaaggatatatatccagcggttttacacaaatgaatattatttcattttcctgtacgagcttttcctgatcctcggtgacatggatgccgctgaaacgttcttttagttttaatgctttttcgattgttctgtttgtgatggtgatatgtgagggatcggcagcgtttgattcgataaacgattcaatcaggatcgttcccatgtttccggtgccgataaagcctattttcaatgaattcccctcctttttcccttaatcctctaaaccttatgcggggaggcaatgcaatatgacgaaagcgatgatgacggagcggctgcggcggaacctgaaaattctgggcgcttgtcttgtagcaggggcggtttttatctgcattttgctgtttcgttctgaaaaggaagagccggtcaaacagcagtccgtgcttggccaaacagcctcagcatccgtcgcggacaaaaaagacaccgcagacgacaagattatgattgatgtgaaaggcgcggtccgaaatcccggcgtgtatgaaatgaaagcgggagacagagtgactcaagccattgaaaaagccggcggcctgaagaaaaaggcggatgaattgaatgttaatttagcagagcagctgcaggacgggacgattgtttatattccgagtgaaggcgaagaggagaatcgcccgaaaacagcagcgggtgaaaaggagaatgcagctgtcaatatcaatacggcatctctggacgaacttcaggcgatttccggggtggggcagaaaaaagcagaagcgattatcgcctaccgagaagaaaaaggacggtttcagactgctgaagatttgatgaatgtatcaggctttggagaaaagtcatttgagcggataaaaacttccattacggtaaagtgaattgacggttctgcttaaatctatgtaaacttagaaaagcaacaagactttttggagggaacacttgtggaacgaatctcatggaatcaatattttatggcgcaaagccatttgctggcgctgagaagcacatgtccgagactgtcagtcggggcaaccgtagtcagagataagcggatgattgccggcggatacaacggctcaatcgccggcggcgtccattgcgctgatgaaggatgtcttttaatagataatcattgccagcggaccatacatgcagagatgaatgcgattctgcaatgttctaagtttggtgttccgacggagggcgccgaaatttatgtgacgcattatccttgtattcaatgctgcaaatcaattatccaggcaggcatcaaaacggtttattatgccgaagattacaaaacacagccttatgctaaagagctgttcagccaagccggagtcaaggtggagcaggtcgaacttgatgaaatgatcatcgatctgaaaaaccgcgaaaaattgtcttttgtagcaggtctgattcagcaattatctgatgcgggggttaaggcagatgaactgaaaaaaattcatgaacaggccaatgagctgtttaccagttacgtataaatgaaatataaataccttcttctgcctctggcggcggtttctgcaactgcgggaattgccgccgctcatgtcttctgggttctgctcctttttcttccgtatcttctctttattattgtaaaaacaaagcaccatgctccggttatcgtctgcctcgtttctttttgtgtttatttctttctttatacggtttgtgacgctgcgaatgtaacgcggtatcaggctggcagttatactgaacaggccgtcatcactaatattccgaaagttgacggagcgaaaatgtcagccgttatccgtacacatgacaaggaaaaatgggcagcttcgtacaaaatccggtctcttgaggaaaagagactcattgaacagcttgaaccggggatgcgctgcacgtttacaggctctctggaacagcctgcacatgcgacggttcccggaggttttgattataaggaatatctttactctcagcagattcactggttattttccgtgacttccattcagcagtgtgaaaaatccaaacagccgctgtttaaactgctgaacatcagaaaaaatttgatttcgatcattcggaatcacgtgcctgaatcttccgccggaattgttgaagcgctgaccttaggtgaaagattttctatagaggacgatatactgagtgcatatcaaaatttgggagtcgttcatttaatggcgatttccggaatgcatgtcggtcttattacggcgggattattttatgctctgatcagaatcgggctgacaagagaaaaagcgggaattttgctgctgctgtttttgccggtgtatacgctgctgagcggtgccgccccatccgtattgcgcgcatccctcatgctgggattttatatcgccggaactcttgttaaacgcggcattcattcctctgttgcattgtccctgtcttatctgctgctcttgctgtttaatccttacttcctttggcaggcgggcttccagctttcctttgcggtaagcgcctctttaattctgtcatcctccattttaaagaaagcagggaaaagcagacttgccgggcttgcgatggcttcattcattgcagaactcagctcacttccgtttcttctctatcattttcagcagatttcacttgtcagttttccgatgaatatggtgatggtgccattttatacgttatttgtcattccggtttctgtcatcggtttccttcttcttttactttcgaggcagatgggagaatgtttgtttgatatgttcaaccttgtgatgaagcctgtgcatgatttcattacatatgcggcatccgttgatttatttactatgattgtgtcaaagcctgactttgtttcccttcttctgcttgcggtttccgtttttacgctttttgcggctttggaaaagggaggttttttaaaactcaggaaatcggctctttttttctgcgcggttttggcttatttaatatgccgtccgtatttcagtccatggggagaagcggatatgcttgatatcgggcagggagactcactgtttataagcgcgccgcaccgcaaagggactgtaatggttgatacagggggagtgattgcttatcccggagaatcatggaaagaaaaacgccacccgtattctatcggcgagaaggttttgattccgtttttaaacggaaaaggggtgaaaaagctggatgcgctgattttaacccatgcggatcaagatcacatcggagaagccggagtgttaatcaaaaatcatagagtcaaacggttaattgtccccgtgggattcgtaaaagaaccgaaagatcagaacatattaaatatggcgaaagaaaacaacattcccgttgccgaagcaaagcggggcgacaccattacagccggtgatcttcagtttcaggtgctgtctccggagtcgtctgacggaaggagtaaaaatgattcgtcactggtgctttggacggttttaggcggagtgagctggcttttgacgggagatttagaatcggacggcgaaacggaagtgctgaaaacgtatccgaaactgaaggctgatatattgaaggcgggtcatcacggcagcaaaagctctacgagtgaagcctttttgaaacagcttcagccggaagcagcgctgatttcagcaggaaaagagaatcgataccatcatccgcatgaagaagtgctggatcgtttgaaggcgtactctgtaaatgtgcttcgcaccgatatcagcggaacgattcaatacagatttaaaaaaggtgccggaacgttttccgtcttccctccatatgatatagaagaaaccagggcgcaagaagtaaaaaagactgccgattgacagcagcccggaatgcggctaagagccgataagatggatggctgttgccatcacgaacaaaaaggcgaaaaatccgaaggacacgacaaaaccgacagctgagtcaacagcatcatttcgtttgctttgaacgtttttttcaaaatcattcaatttcatccctcctgacttccctaagtatactggaattgttttgaaaaatctagaagtgatggtaacgttttctgttcttgtgattatcgcctttttacaagcagacccgggagcttgtgaatcaggcgtttattataaatgaggaagctgtccttaaagcttcctctttactatttgccgaactcaatttaggatagaaggggatcaagaaagagaggaagtcatacgatcatggtatttgatgtttggaaagccctgaaaaaaggggatgtccgctccgtttattgcttatacggaaaagaaacgtatctgctccaagagactgtcagccggatcagacaagctgtcgttgatgaggagacaaaggattttaacctgtctgtttttgatcttgaagaagatccgcttgaccaggccgtaaccgatgcggaaacgtttccgtttatgggagagaagcggctggtcatcgtaaaaaatccgtcttttttaacaggggaaaaaaagaaagaaaaaatagagcataatacagccgctctggagacttatctgaaggagcctgcaccttacacggtctttgtgattgtggctccgtatgagaaactggacgaacggaaaaagctgacgaaagcgctgaagcaaaaagcccttatgattgaagctaaggagctgaatgcaaaggagacgactgattttacgattaatctggcgaaatccgaaaataaaacgatcgatacagaagctgccgagcatttggttctgcttgcaaacggccatctgtcttccatatatcaggaaatacaaaaactctccgcctacaccggtgacagacatgagatcacacttgaagatgtccgtgagcttgtcgcaagaagtttggagcagaatatttttgagctgatcaacaaaatcgtgaaccgaaaacggacggaaagtcttcaaatattttatgatcttttaaaacaaaacgaagaaccgatcaaaattatggcgctgatcgccaaccaattccgtctgattatgcagacaaagtattttgcaggacaaggatacggccaaaagcaaatcgcttccaacttaaaggtgcaccccttccgggtaaagctggcgatggatcaggcgaggcttttttctgaagaagagctgcggcgtattatagaaagactcgcagtgatggattatgaaatgaaaacggggaaaaaggacaagcagctcttgcttgagctctttctccttgagcttctccggactgaatgaaaaaaacgatccccgttaaagggatcgtttttgtattatgcagaaagtccgttcacttgtttcgcaagtctagatttgtatcgagctgcggcatttttgtgtacaagacctgttttcactgctttatcaatgcgtttcgctgcttcagaaagagcagttttcgctttatccgcttcgttgttagcaacagaagcttcaacttgtttgattgcagtacgcatagcagatttgattgtcgcgttatgagcgcggcgttcgttgtttgtttttgtacgtttaatcgctgatttaatgtttggcatgtgtttcacctcctaagatacaacctgtagcacagtgtcttaaggttaaatcttcttcacaatagaacaaattgtattctatcaaacagaactttagattgcaatataaatgtaaagtatttttcgttgatgggtaaattcgcatgattcgttttgtaaatggccacactatgtacaacgatgattgaaggaggtcttccctgtgaaaaacaacgaactggatgtcaatcaatttctgatacggacggatttagcggtagaaacgaaacaggcggtaaaagacggacaagccggtcagaaaaaagaaataaacgggtttattgaaaaagaacgcgacaagggcggcattaaagtcagaaccgtcgatattaccaaagaaggcgccgagctatcggggaaaaagcagggacgctatgtcacgatcgaggctcaaggggttcgggaacacgactctgacatgcaggaaaaagtaacggaagtgtttgccgaggaattttccgcctatttgtcggcattaaagattccaaaggatgcaagctgtttgatcgtcggtctcggcaactggaatgtgacgccggatgcgctcggccctctcgtgaccgaaaaccttcttgtgacaaggcatctgttcaggcttcagcctgaaaatgtgcaggaagggtacaggccggtcagcgcgcttgctcccggtgtgatgggattaacgggaattgaaacgagcgatattattcaaggtgtcatcaaagaatcaaagccggattttgtgatcgcggtagacgctcttgcggcaagagccgttgaaagggtgaacacgaccatccaattttctgatacgggcattcacccgggatcaggcgtcggcaataagagaaaagaattaagcaaggaaacgctcggcattcccgtcatcgcaatcggggtaccgactgttgttgatgcggttacgatcgcaagcgatacggtggattatatattaaaacatttcggcagagagatgaaagatgacagcccgtcaagatctctggtgcccgccggaatgaacttcggcaaaaagaaggtgctgacagacgaagaccttcccggagaaaaagaacgccaatcctttctcggtattgtcggcacgctggacgaaaacgaaaaacgccagctgattcatgaagtgctttctccgctcggccataatctgatggtcacgccgaaggagattgacacctttattgatgatatggcgaacgtgcttgcaaacgggttaaacaccgcccttcatgaaaaagtgtcacaagataacaaaggttcttataatcattaaaatggttctacctcctctagcttgttcatagagtaattactagacaagcgctggagggattcaaatcatgagaaaaaaacgcagaaaccgtcaaattgtcgttgcagtaaacggtggaaatgcgctcaagggcatgtttttgtttatgacaagccttatcgttatttttgtattatcgggtgtgctcacatcgcttcgccctgaactgaggctttcttcggattctcttcacggaattgccggagaacttccgggtgacgcgtttgcacacctcctcggcatggaaaatcattatttcgcctcagagcttcctgaaaaagactcttttcagctgtcccggctttccttaaaactggcgacaagcattaatatggaagacccgcggagtttcttgggacgtgagctgccgggatttgcccaatatgatacggagatccttctggcggggcaggggacggattatacgaatatgccggctgaatctccgccgccgtcaaaggtgatggaaaaagaaaaagaagtgaacctggcagaaatcgaaaacaaaacgaaaaaagaagaaacggcgccgccgaaacattcaacaggcagcaaaaaagtcgtttttatttaccacactcataataccgaatcctatcttcctctgttaaagggggaaacaaatccggataacgcccgccattcgaaggccaatgtcacgcttgtcggagatatgttcggaaaagcgcttgaagcgcaaggtgtaggagcgaccgtagataaaaccgacattcaggcccgcctgaacaaagatggcttaaattatgcgcgaagctacgacgaatcaaggccggtcgtaaaaagcgcgctcgccaaaaataaaaacctgcaatatacaatagacattcaccgggattcccgccgcaagaaaaatacgacagccgacattaaaggaaaaagctatgccagagtcgccatcgtcgtcggcaaaaaaagcgctaattttgaagaaaactataaactcgcaagtgaacttcataagctgatggagaaaaaataccccggcttaagcgtcggtgttttatcaaaaggctctccgggagataatggagtatacaaccaagatttaaacgaccggtcgcttctgctggaattcgggggcgtggataacaatcttgaagaactgaggcgcgcatcagatgccgtggccgatgtgttcagcgaactgtactgggatgcagaaaaggtcagttcgcaatcaggagagaagaaaaaacaatagaaatcaggtgattcgaatgatccgttttaccggcaaatgcctgctgatcgccattgtcatgtttttcggcgttttgttcggcatgcagcaggcaaacagcggaatgcttgatatgaaaggatacaaagatccctccttaaaaggagcgttcacgctcggcggcggagaaggacaggaaaaagaagcttccattttggagcaaaccgttacggcgaaagatctggaagaaaaacaaaaacagctggaacaggcggaaaccttcaacttgttttcaaaagccggggaaaccctttcaaataccgtgacggactcggcgcaggcgatgtatgagtgggtttcgaaactgaaccgttagcattgatgaagagaaaagcggatgattccttaaaggaagcttttctctttcttgttttaattgaatgtttacaatcctattgatataatctaagctagtgtattttgcgtttaatagtaggagtgatagattgtgacagataaagaaaagcgtttagagaggcagtcaagaatccggaatttctccatcatcgcccacatagaccacggcaaatcgaccttggcggatcggattttagaaaaaacatcggcgatcacccagcgggaaatgaaagaacaattgcttgattcaatggaccttgaacgcgaacggggaattaccatcaaattaaattccgttcagctgaaatataaagcaaaagacggagaagaatatatattccatctcatcgacacgcccggacacgtcgactttacatatgaagtttcgcgaagcctggctgcctgtgaaggcgcgattctcgttgttgatgcggctcagggaatagaagcgcagacattggcgaacgtctatctggcgcttgataatgatcttgagattcttcctgtcattaataaaatcgatctcccgagcgcagagccagaacgtgtgcgtcaagaggttgaggacgttatcggccttgacgcttcagacgccgtcctcgcttcagcgaaagcgggcatcggcatcgaagacattttagaacagatcgtagaaaaagtgccggctcccgcgggagatccggaagctccgctgaaagcgctcatctttgactcgctttatgacgcgtaccgcggagtcgtcgcgtatatcagagtcgtagaaggaacggtcaaaccgggccagaaaattaaaatgatggcaaccggaaaagagtttgaagtgacagaagtcggtgtgttcacgccgaaagcaactccgacagatgaactgactgtcggcgatgtaggctttttaactgctgcgattaaaaatgtcggtgacacacgcgtcggtgacacgataacaagcgcggccaatcaggctgccgaagcattgcctggatatcgcaagctgaacccgatggtgtattgcggtttgtatccgatcgatacggccaaatacaacgatttaagggaagctcttgagaaacttgaactgaatgactcatcgcttcaatatgaagcagagacatcccaagcgctcggattcggtttccgctgcggatttttaggtatgcttcacatggaaatcattcaagagcggattgaacgggaatttaaaattgatcttattacgaccgcgccgagcgttatttatgacgtatatatgacggacggcgaaaaggtcatcgtggataacccgtcaaacatgcctgatccccaaaaaatagagcgggtggaagaaccttatgtaaaagcgacaatgatggtgccgaacgattatgtcggtgcggtgatggagctttgccaaggaaaacgcggcaattttatcgacatgcaatatttagacgcaaatcgtgtcagcattgtctatgacatgccattagcggaaatcgtatatgaattttttgatcagctgaaatccagcacaaaaggctacgcgtcctttgattacgaactgatcggctacaaaccgtctaaacttgtcaagatggacattatgctgaacggagaaaaaatcgacgccctttcatttatcgtgcatcgcgattacgcgtacgaacgcggaaaagtaattgtggaaaaactgaaagagcttattccgcgccagcactttgaagtaccgattcaagcggcgatcggacagaaaatcgtggcccgctcaaccattaaggccatgcggaaaaacgtccttgcaaaatgttacggcggagacatctcgcggaaacggaagcttcttgaaaaacaaaaagaaggaaaacgccggatgaagcaggtcggctcagtagaagtgccgcaggaagcgtttatggccgttcttaaaatggatgacagcccgaaaaaataacggaagccgccgcagtcccgcgctgcggcttctttctgtaaagaagaaggtgtttcaaaatgaaatcagcttatattcatattccgttttgtgagcatatctgccactattgcgatttcaataaatattttattcagagccagcctgtcgatgagtacttaaactcactcgaaaaggaaatgataaatacaatagaacggacgggacgccctgatctccgcacgatttttatcgggggaggcacgccgacatcgctctcacccgtccagctggaaaaattaatggattccattcaccgcgtgctgaagccttctggcggactcatagaatttgccgcggaagcgaatccggatgatttgtccccggaaaaattaaaaatcatgaaaaatgccggtgtcaaccggttgagcttcggtgttcaaacctttgaagatgagcttttacaaaaaatcggcagagtgcataaacaaaaggacgtattcacttcctttgaacgtgcgagggctctcggcttcgacaacatcagtctcgatttgatgttcggcctgccgggtcagacgctggccgatcttgacaattccgtcaaaacggctttgtctcttgatgcggagcactattccgtttactcgctgatcgtagagccgaaaacggtgttttataatttaatgcaaaaaggccgcctgcatctcccggcgcaagaacaagaggccgagatgtatgaaacggtcatgaggcagatgagtgaagcgggcatccgtcaatacgagatcagtaactttgcaaagcccggatacgagtcccagcataatctgacgtattggagcaatgaagagtatttcggttttggcgcaggcgctcacggatatatcagcggcacgcgcaccgtcaacgccgggcctgttaaacattacatgcagctcatcgaagaaaaggggctgccttaccgtgacacgcacaaggtgacacgtgaggagcagattgaagaagaaatgttcctcggtctcagaaaaatgtccggcgtacaaaagcaagcttttctcgataaattcggacgctcggtcgacgaactgtttcccgatgttctcaaagatttaaccgaaaaaggcctgatctgtgacgcggaagaatcggttgcattaacgcatgagggcaaattattaggaaatgaggtttttggtgcttttttgggtgagttataattgacatttttcttttggtttgttacttttgatatagaattagcactcgctgaccttgagtgctaacaggggtgatgatgatgttaacaaatcgtcagctgttgatcctgcaagtgattattaatgattttatacaatcagcgcagcctgtaggatcaagaactctttcaaaaaaagacgagattacattcagctctgcaacgatcagaaacgagatggctgacttggaggaattgggctttattgaaaaaacccattcatcctcaggacggattccgtcggaaaaagggtacaggtattatgtcgatcatttgctgtcacccgtcaagctgacaaaaaccgatctggatttaattcactcgatatttaaagaaaaaatcttcgagctggaaaaaacagtccaaaaatcagcgcaaatcctgtccgatctgacaaactacacatcgattgtcctcgggccgacgctgagcgagaactatcttaaacagattcaaatcgttccgatccagccggataaggcggtcgccatcctcgtcacgaacacggggcatgtcgaaaaccgcaccatcaatttcccggctaaagtagatttggccgatattgaaaaactggtcaatatactaaacgatcgattagcgggcgtgccgatggacgaactgaatgagcgcattttcaaagaggttgtcacatatttaaggcagcatatcgccaactatgacagcatacttgaatcgctccgctccacattccatccggcggcccacgttgagaaattgtttttcggcggaaagatcaacatgctgaatcagccggaattccatgatattgaaagggtccgctcgctcttatctttaattgaaaaagagcaggatgtcctgaagctgtttcagtcatcaaaagccgggatttcaatcaaaatcgggaaagaaaacgactacgaagaaatggaaaactgcagcttaatcacggccacctatacagttgatacgaaacagatcggatcaatcgccattatcgggccgacgcgcatgaattattcaagagtcgtcagcctgctgcagcacgtgacttcggacttgtcaaaagcattcacaagtttgtatgatgaataagggaattttggcaatcattttcagtcatctttttacagcatttgagggaggtgaacacaatgtcagaagaaaaacaaaccgcagaacaggttgaagcagcagaacaagaagaagtgacagaacaggcagaacaagccgcttcacaagagcagcatgaagaaacggcaggtcaggaagaagcccttcagcaccaaattgatgaattgcagggtttgcttgatgaaaaagaaaacaagcttttgcgtgttcaagcagactttgaaaactataaacgacgcagccgccttgaaatggaagctgctcagaaataccgttctcaaaacgtcgtaacggaaatccttccggctctcgacaattttgaacgggcgctacaggtagaagctgaaagcgagcagacaaaaagcttgctgcaaggtatggaaatggtccgccgccagctgatggacgcacttgaaaaagaaggcgtagaagccatcgaagctgtcggtcaggaatttgatccgaaccttcaccaagctgtcatgcaggtggaagatgaaaacttcggcagcaatattgttatcgaagaactgcaaaaaggctacaaactgaaggatcgcgtcatccgtccttcaatggtaaaagtgaatcaataactacatagcaggaggtaattcaaagtgagtaaagtaatcggaattgacttgggtacgacaaactcatgtgtggcagtgcttgaaggcggagagcctacagtcatcgccaacgctgaaggaaaccgtacgactccgtcagtcgttgcatttaaaaacggcgagcgccaagtaggggaagtggcgaaacgccaatcaatcacaaatcctaacacaatcatgtctgttaaacgccatatgggtactgactataaagtggaaattgaaggaaaagactacacgcctcaagaagtgtcagctattatccttcagcatctgaaagcatatgctgaaagctacctcggcgaaacagtttcaaaagccgttatcacggttcctgcatactttaacgatgctgagcgccaagcgacaaaagatgccggtaaaatcgccggtcttgaagtagagcgtattatcaacgagccgactgcagcagcgcttgcatacggacttgataaaacggatgaagaccaaacaattcttgtttacgaccttggcggcggtacgtttgacgtatctgttcttgaacttggcgacggcgtgtttgaagtccgttcaactgccggtgacaaccgtcttggcggggacgactttgaccaagtcatcatcgatcatctcgtagcagaattcaaaaaagaaaacggcattgatctttcaaaagacaaaatggcgcttcagcgtttgaaagatgcggctgagaaagcgaaaaaagatctttccggcgtatcatccacacaaatttctttaccgtttatcacagcgggagacgcaggtcctcttcaccttgagctgacactgacccgcgctaaattcgaagagctttccgctcaccttgttgagcgcacaatggctcctgtccgtcaggctcttcaagatgcggatctttctgcaagcgaaatcgacaaagttatccttgtcggcggatctacacgtattcctgccgtacaggaagcaatcaaaaaagaaacaggcaaagaagcgcataaaggcgtaaaccctgatgaagttgtagcgcttggtgctgcaattcaaggcggcgtcatcacgggagacgtaaaagacgttgttcttcttgacgttacaccgctttctctcggtattgaaacaatgggcggcgtgttcacaaaactgatcgaccgcaacacgacaattccgacgagcaagtctcaagtattctcaactgcagctgacaaccaaacggctgttgacattcacgtgcttcaaggtgagcgcccgatgtctgccgacaacaaaacgctcggccgcttccagcttactgatatcccgcctgcaccgcgcggcgtaccgcaaatcgaagtttctttcgatattgacaaaaacggtatcgtaaacgtaagagcgaaagatttaggcacaggaaaagaacaaaacattacaatcaaatcttcttcaggtctttctgatgatgagatcgaacgcatggtaaaagaagcggaagaaaacgctgacgctgatgcgaagagaaaagaagaaatcgaagtccgcaacgaagctgaccagcttgtattccaaacggaaaaaacattaaaagatctggaaggcaaagtggacgaagagcaagtgaaaaaagcaaacgacgcgaaagacgcgctgaaagccgctatcgagaaaaacgaaattgaggacatcaaagcgaaaaaagatgaacttcaaacaatcgttcaagagctttctatgaagctttacgaagaagcggcgaaagctcagcaggctgaaggcggagcaaacgctgaaggcaaaaaagcggacgacaacgttgtcgatgcggaatacgaagaagtaaaagacgacgaaacgaaaaaataagttctttcctgcttggctataggcggaagaacacacagcatattctgattcaacagacagaaagtcaaagtcaggcatctcttggctttgactttttttcttgcccgggataaaaggaattgaaaaaacataattcaaaatgatacaatctaatttatgtgagaaattcgggagagtgaagcgagatgagtaagcgtgattactatgaagtgcttggggtaagtaagagcgcttcaaaggatgaaatcaaaaaagcctatcggaagctttcaaaaaaatatcatcctgatatcaataaagaatccggagcagatgaaaaattcaaagaggtaaaagaagcgtacgaagcgctctcagacgaccaaaaacgcgctcaatatgaccaattcggccatacagaccctaaccagggattcggcggcggtttcggaggcggcggagacttcggcggcttcggtttcgatgacatcttctcaagcatcttcggaggcggcacgagacgccgtgacccgaatgcgccgcggcaaggcgcggatctgcagtatacaatgaccctgtcatttgaagacgcggctttcggaaaagaaacgatcattgaaattccgcgcgaagagaattgcgaaacatgtaaagggtctggcgcgaagccgggaacaaagccggatacgtgctcgcactgcggaggttcaggtcagctgaacgtcgaacagaacacgccgtttggcaaagtggttaaccgaagagtctgccaccactgtgaaggaacaggaaaaatcatcaaaaacaagtgttctgactgcggcggcacgggcaaagtgaaaaaacggaaaaaaatcaatgtcacgattcctgccggtgtggatgacggacagcagctgcgcgttccgggccaaggtgaaccgggcgtaaacggagggcctgcgggagatctgtttgtcgtattccatgtgcgcgcccacgagttctttgagcgcgacggagacgatatttattgcgaaatgccgttaacgtttgcccaagcggcactcggagacgaagtggaagtgccgacgcttcacggaaaagtgaaattgaaaatacctgccggcacacaaaccggcacgaaattcagattaagaggcaaaggcgttcagaacgtccggggctacggacaaggcgaccagcacattgtcgtccgcgtcgtcacaccgacgaatctgacagacaaacaaaaagacatcatccgcgagttcgctgaagtcagcggaaacctgccggatgaacaagaaatgagtttctttgacaaagtaaaacgcgcatttaaaggcgagtaatgattggataggagttggtagttttgaaatggtccgaaatcagcattcacacaacacatgaagcggtcgaacccatctcaaatattttgcatgaagctggtgcgagcggggttgtcatcgaagatccgcttgatttaatgaaagagcgtgagaatgtttacggggaaatctaccagctcgaccccaatgattaccccgatgagggtgtcattgtcaaagcgtatctgccgatcaacagtttccttggagaaacggtggacggcattaaagagacgattaataatctgcttttgtacgacattgatttgggcagaaacaaaatcaccatttctgaagttaatgaagaagagtgggcgacagcttggaaaaagtattatcatcctgtgaaaatttctgaaaagttcacgatcgttcccacatgggaaacatatacacctgttcatacagatgaactgattatcgaaatggatccgggtatggcattcggtacgggaacgcatccgacaacagttttgtgcattcaggcgcttgagcgtatcgttcaaaaaggcgaccgtatcattgatgtcggcaccggttcaggaattttaagcatcgcggccgccatgcttgaggccgaatcggttcatgcgtatgaccttgatccggtcgctgttgaaagcgcgcgtctgaatgtgaaattgaacaaagtgagtgatacggccgaagtgaagcagaacaatttgttagacggcatcacgggcgaacatgatgtcattgtcgcaaatattttggcagaagtgattctccgctttacatcacaggcgtacgacctgctcaaagacggaggccattttatcacttcaggcattatcggccagaaaaaacaggaagtaaaagaagcgttggaaaaagcaggctttactatcatagaaattctgtctatggaagattgggtcagcatcatcgcgaaaaaataacagttagtaggtgtcacagcgtatgcaacgatattttatcgagctcacgaagcaggagatggacgaaactcctgattttcaaatcacgggggaagacgtccaccatatagcgaacgtcatgagaatgagtgcgggagaccggattatctgctgttcgaaagacggccatgaagcgttatgcctgcttaaagaggtttctaaagatcatatatcatgcagcattgctgagtggacgggtgaaaaccgtgaactgcctttgaagatcaggatcgcaagcggccttccgaaaggcgataagcttgaatggattatccaaaaagggaccgagctgggggcaagtatgttcatcccttttcaaggcgccagatccgtcgttaagcttgacgacaaaaaggcaaagaaaaagcgggagagatgggcgaaaatcgcgaaggaagcggcggagcaatcgtaccgcaatgaaattcccgaagtgaaaaccgttcatacgttccggcagctgcttgagatggcggagaatgtcgataaatgtgtcgttgcatacgaggagtcatcaaagcagggagaaacgggcgctttcgccgcggagctcaaaagccttccgcaaggttcgtctcttttaatcgtattcggccctgaaggcggtctgactgagtctgaagttcatcagctttcagaaaaaggcgccgtcttatgcggcctcggaccgagaattttacggactgaaactgcgcctctttacgcgttaagcgcagtttcctatcatacagagttattaagaggtgatcagtaatggcaactgttgcttttcatacccttggctgcaaggtcaaccattatgaaacagaagcaatctggcagctgtttaaagatgcgggttatgaacgaaaagaattcgaacagacagcagatgtatatgtcattaatacatgtacggtaacaaacacgggagataaaaaaagccgtcaagtcatcagacgggcgatccgccaaaatcctgacggcgtcatctgcgtaacagggtgctatgcgcaaacctctccggcagaaattatggccatcccgggtgttgacatcgtcgtcggcacgcaggatcgtgaaaaaatgctcggttacattgagcagtacagggaagagcgtcagccgatcaacggcgtcggcaatattatgaaagcacgcgtgtttgaagagctggatgttcccgcttttactgaccgcacaagagcgtcgttaaaaatccaagagggctgcaacaacttctgtacgttctgcattatcccttgggcgcgcggcctgcttcgttcccgcgatccggaagaagtcattaaacaggcgcagcagctggtggatgccggctataaagaaatcgtcctgacggggattcatacgggcggctacggcgaagatatgaaagattataatttcgccaagcttctccgcgagcttgatacacgtgtagaaggactgaagcggatcagaatttcatctattgaagcaagccaaatcactgatgaagtaattgaagtgctggatgcgtctgataaaatcgtccgtcaccttcatatcccgattcagtcaggatcaaatagcgttctgaaacggatgagacgcaaatatacgatggaatttttcgcggaccgtttaaataagctgaaagaagcgctgccgggtctggccgtcacatctgatgtcatcgtcggtttcccgggtgaaacggaagaagaatttatggaaacataccggttcattaaagaacataagttttcagagcttcacgtattcccttacagcaaacgcaccggaacacctgcggccagaatggaagaccaggttgacgagaacgtgaaaaacgaacgggtgcataagctgatcgcgctgtcagaccagcttgccaaagaatacgcctccgattatgaaggagaggttctggaaatcattcctgaagagacgtttaaagagtctgatgaagacggcatgttcgtcggctatacggacaattacatgaaagtcgtcttcaaaggcacggaagatctaatcggcaaacttgtcaaagtcaaaattcaaaaagcgggctatccgtataacgaaggacaattcgtccgcgtcgttgaggatgaaatgacccgaaacatgcgcatgtcttcataacatatttaaaaaaaccggtgccttcccgcatcggtttttttacggtttcggaggaatcagcctgtcaatcagccggtaaaacaaatgtgtgaacggcagaaacaatagggcggtgactacgttaaataacaggctgaaatgcgcaatcatctgcgcgggatcatcagacaggcgctccgtaaaacccgctgatgcggacaggaagggaaatacgagcagcacgccgagaatattaaacacaacgtgagcaccggcggtctgtctggcggcataaccgcctgaaacagcagccatgacggccgtgacgcatgtcccgatattagatcccagaacgacgctgaccgcttgttcaatgccgatcaccccttcgttcataaaactcatcaaaatgccgatgcagacggagcttgaatgaatgattgccgtcaatatcataccgataaaaagagcggaccagctcgaatcattcacatgtcgcaaaacctccgcccccgccttcatttctgtcagcggaacggcgagccggctgaagcatgtgatgcaaaaaaagatgatgccgagaccgaggaagcttatgccgatctgcctgaacggatatttacggaggaggataaacacaaggcctccgataaaaagcacccaaatgagcacatccatcttgatggctaaaaactccgtcgtaaacgttgagccgacattcgtgccgagaatcatcggaatagtccgtttaaaagataaagcgcccgcactgacaaagccgatgacaatgaccatgaaggctgagctgctctgaagaaaaccagtgaacacgatgcttatgagaaaagctttcaaagggtggtcggtaaataagagcaggctcttctcaatttttgaatacgttaatgcgatcagcccctgcctgagcaggctcattccgagtaaaaaaaccaggataagtgcggtaaagagaatcagtatcatcaaacgaaacacccctttccatcattatatagacaagcagccttattcatgacggaaaagtgagctcgcttagttgacctgactgatggcttatattataatgtcaaagtacatgtttatatatgtatctttttaaaggtagtcgattggtgtattcggagggagggaaagagaatgtcaaaaacggtcgttagaaaaaacgaatcgcttgaagatgctcttcgtcgcttcaaacgcagtgtatcaaagacaggtactttgcaagaagcaagaaagcgcgaattttatgaaaaacctagcgtaaagcgcaagaaaaagtcagaagctgctagaaaacgcaaattctaaaagagggtggatttatgagtcttcttgagcgacttaaccaagatatgaagctgtatatgaaaagccgtgagaaagacaaactgactgtcgttcgaatggtgaaagcttcacttcaaaacgaagcaattaagcttaagaaagacagtttgaccgaggatgaggaacttactgtcctatctcgtgaacttaagcaacgtaaagactccctccatgaattttcaaacgctaatcgtttagatttagtagataaagttcaaaaagagctggacattttagaagtttatttaccgaagcagctctctgaagaagagctgcagacaatcgtaaatgaaaccatcgctgaagtcggtgcgagctccaaagcggacatgggcaaagtgatgagtgctattatgcctaaagtaaaaggtaaagctgacggcagcgtaattaacagactcgtcagcagtcaattatcttaattgacaagaaaaaagacatctttccttgagagatgtctttttttatacataaaaaaatgaaactaaagtacatttgttacgtatataaagaagaacgaaacgggaaggagggtatatttgccttgttccgaaaaaaaaccggaattgctgttgctctattgggcttatttgtattatctttattaggggttcaattgaacgcgaaagctgatcacccatcggtttatgtcatcccggttgagaaaaatgtcgaacaggggctcgcctcgtttttatcgcgttctttcaaagaagcgaaggagtccggcgcgtcacacattattcttgacatcaatacaccgggaggcaccgttcaatcagccttggatattgcggatatcatcggccgcgcggatgtgcctgttaccgcttacgttaataaacgggcgctttctgccggagcgtatatagcgcttcaggcagatgaaatctatatggcgccgggcggaaaaatgggtgccgcagccatcatcgacggaaaaggaaacgcggcagacaaaaaggcccaatcactgtggcatgcagaaatggaggacgcagcggttaaaaacaatcgaaatccgaaatacgccctggccatggcagatcccgccatcaatgcaaaggaagcgggcgccccaaagggaaaactgctgacactgacagctgaaaaagccaaggaagtcggatattcggagggcacggtttcagaccttgatgctctatatacaaagctcggttttgacaaagcggatgttcaccatgcagaagaaggtttcgtcggcaaactgggccgatggctgacaaatccgtttgttgtccccgtcttattaacgcttgctttgcttggtttgaccattgaattgttctcgccgggcctcgggataccgggtgccgtcggactgacggccatgctgctgtttttcaccgggcatatcgctgccggattcgccggctatgacagcatattcttattttgcgcgggcttggtttttatccttttagagatatttctgcccggaggcataatcggtcttatcggtattgcaggcgtcatcgcgagcctctttctcgctgcgggcagctttaccgtaatggcggtttctctcttgatcgccattgctgtgtctattacagcctttatcatattaacaagggtgttggggaaacgaatgaaattctttaaaaaattaatattaactgattcaacaagcacggagagcggttatgtttcaaatcagaaccggacggagctgttgggaaaagtcggcattaccgctacagccctcagaccgtcaggcaccgtcattattgatgatgaacgtctggatgtcgtctcggaaggatcattcactgaaaaagacagacaggtgaaagtagtgaaagcggaaggctcacgcattgtcgtgagagaaatatagatgataaccttgaggaggaattagatggaactgtcaagtttggcgattttagcattagttgctgctgccattattgtgttagccatattcttcacctttgtaccggtgatgctatggatttcggcgcttgcggcaggagtcagaatcagcattttcactttggtcgggatgaggctgcggcgcgtcataccaagtcgcgttgtcaatccgttaattaaagcgcacaaagccggcctatccgcaacaacaaatcagctcgaaagccattatctggccggaggtaatgtcgacagggtggtcaatgccctgattgcggcacagcgcgccaatattgagctgacatttgaacgctgcgcagccattgacctggccgggcgtgacgtattggaagccgtacagatgagcgtcaatccgaaggtcattgaaacaccgtttatcgcgggtgtcgccatggacggaattgaagtaaaagcaaaagccagaatcacggtaagagccaatattgagcgccttgtcggaggagcgggagaagagacggttgtcgcccgtgtcggagaagggattgtctcgacaatcggttcttcacacaatcataaaaaagtacttgaaaaccctgatatgatttcgcagaccgtacttggcaaagggctggattcaggtactgcatttgaaattctttcgattgacatcgccgacgttgatatcggcaaaaacatcggagcgattcttcagacggatcaggcagaagcagacaaaaacattgcgcaggccaaagccgaagagcgccgcgccatggcggtcgcccaagagcaggaaatgcgcgctcgcgtagaagaaatgcgtgcgaaagtcgtggaagcagaagccgaagtgccgcttgcgatggcagaagcgttgcgtgaaggaaacatcggcgtcatggactatatgaacataaaaaatatcgacgcggatacggacatgagggattctatcggcaagctgacgaatgaccagcaagatgaagaccaacaataacctctctattaaggagggagccgctatatgcacgagattctgacaaatccgctcgtcattgccgccgtcatcggcattatatcggcaatattcggcaagaaaaacaaagatgaaaaacgtccgccgggtacacgtcccgaaaatcaggcaaaaaagcaggatcaaaaacagccgcagaaagagcataagccggaagcggaagaattgcctgccgtttcagaagagaacccttttgagcaaaaaagaagggaagctgaacagcgcctttcggagacggagcagatgtttaacgggcttgaacataagctgacatccccacgcgcacgaaacgcgtctctgaagaaatcagccctcaaaataaataaagaaactgcggtccaaggcattatattcagtgagattttggggccgccccgtgcaaaaaaaccgcaccggaccatgcggaacatcggtaaaaaataaagtgttagaaccccttttcaaatcatacatatgagatgaaagggggttctttttttatggggcaaagaaagaatcgtgtaaaggcatggctgacaagagcattggaaattcccccggacgttatgatggatctgcctcgtattacgatggtcggcagacttcatatctacatagagaatcacagaggcctcctgctgttcagcgaagaagaagtcaggctgatgctcaagcaggggcagtgtatcatatcaggaaaaaacttggtcattaaggcaatccttcctgaggaaatccttttggaaggcacgatagatcacgtacgatatgtcgattcataaagccggggggaaataatgtgaaaaacaaatggctgtcatttttttcgggtaaagtccaaatggaagtcaaaggaaaagggattgaacggctgctgaatgaatgtacgagaaacggaatcgccatctttgcggtgaaaaaaaagcaagactgtgttctgctgatgattcagcttcaagatgtacatgctttcagaagagtcatcagaaaacatgaatgcaaagctagctttacaaaaagaaagggtcttccctttctgcttctcaaatcaaaattaaatctgggtttcactgcgggatttgtgatattttttgttatattgtttcttttgtccaacatgatttgggaaattgatattaaaggggccaagccagagaccgagcatcagatggtaaagcaccttgaagaaataggtgtaaaaaaaggccgtttgcaatttttaatgatgacgccggagaaaattcaaaaatcattaacaaacggtatcgataatattacgtgggtcggtgtggaattgaacgggacagcccttcatatgaaagtggtcgaaaaaaacgaaccgacaaaagaaaagtacgtcagcccccgccatatcgttgccaaaaagaaggcggtcatcaaaaggatgttcgtgcaaaaggggcagccgatggcttttgtgaacgatcatgttgacaaaggacagctcctcgtctcaggactgatcggaaatgaagaccggaaagtcgcctcaaaagcggaaatttacggagaaacatggtacaagtcagaagtaaccgtgcctcttgaaacatcatttacgctatatacgggtaaagtaaggacgaagcacaagctgtctttcggatcatggggcgtgcctttttggggctttgaatttaatgagaagccgttgaaacatccgaaaacagaggaagaaaagcatccgtttcaatttctggggatgaagcttccggtttcttacgttcaagaacagacaagagaaagtgaaacatccgtgcggacttatacgaaaggcgaagcggttcaggccggtatcaaaatgggaagacaagatgtagaaaagcgattaaacggcagcggagaggtggaaagtgaaaaagttttgcaccaatccgttgagaatggtaaagtaaagttgattattctctaccaagttatagaagatatcgttcaaaccacacctattgttcagggagactaaagaatggcagaacatttacttgcgattaatcacaaactgaaaagcccggacgaagcactttctttgttcggcagccaagatgcctttttacatttaatggagaaggatctgggcattagcctcatcacacgcggtgaaaccatttacgtttccgggaatgatgaaacatttgagatcgctgacagattattgggctcgctccttactttaattcgcaaggggatcgagatttcggaacgtgatgtgctgtatgccgtgaaaatggcaaaaaaagatgaactggactattttgaaagcatgtatgaagaggaaataacgaaaacggcaaaaggcaaaccgatccgtgtcaaaaccatcggccaaagagagtatgtggcggcgatgaagaaaaacgacatggtgttcggcatcgggccggcgggaaccggcaaaacttatttggcggtcgtaaaagcggtgcatgctttaaaaaacggccacattaaaaaaatcattttaacaagacccgctgtggaagccggcgagagcctcggctttctgcccggagatttaaaggaaaaagtagatccttatctgcgcccgctgtatgacgcgctccatgatgtgctcggaagcgaccatacggagcgtcttatggaaagaggggttatcgaaatcgccccgcttgcctatatgagagggcggacgcttgacgacgcgtatgtgattcttgatgaagcccagaataccactcccgctcaaatgaaaatgtttttgacgagattgggttttggctctaaaatgatcattacgggcgacgtaagccaaattgacctgccgaaaggcgtcacatcgggacttgcagtagcgaaggacatgctgaaggacgtaaacggcatctccgtgattgaacttgaccagacagatgtggtcaggcatccgcttgttgcaaaaattattgaagcttatgataagcaaaagtaatgcaaaaatgacccgatctcccgttatcgggtcatttttatatgatgtgttcctgatgtttcagggaggaggttcttgttttgaaaaagaagggaaagggcaaaagcgcccgggaacggttccgcagtttcagacatgcccgctcagcccatgtgctgctgtacctgctgctttcagcgatcatgtttggtttgctctttattcatgtaaaacctgaatcacttaatttggatttgtttgcagtcagtgataagacgatttacgcgcccgccacagtggaagatcagcaggcgacggaatcgaaaaagcaggcggccgaagatgcggtggaagatcaatacactctgaaaaaaggctataccgacaaccggcttgacctgatcacttccatttttgacagcatcggcgaagtgaaaaaagatgcggaaaaagacaaaaagtcaccttcggaaaaatcactggtaaaatcggtaaaaaacaagctgacacaggatgtcaatgaatccgtctcggaagatgccattaaatcgcttctccatgcaaacaatgaagatttctcatttgtgagggattccgtcattaccgcggtgaatacggtgatgagcagtgaaattccttctgaaaagcttgctgaagcgaaggataaggtcgcaaaagagctgaaaagcgcttctgtgccgtcaaaatatttagcggctgcgactgaaatcggaaaatacgcggtcatcccgaattacgtatttgatccgaaagcgaccgatgaaaaacgtcaggaagcgtcagacagcgtccagccggtacagatcaaacagggacaggttctcgtggaagagaatgatctgatcgaccgggaagtatacaggaagcttgaactgacgggtcttttgaataattccaacctgttaaaaccgatcagcggtctgcttctgatgatcggtctgtttatcgccacgcttgtctactattttgagaaacagcagcaggagcttaagctgaaaaataaatctcttttgctgttttctatcattacaacgcttattctcgtcattatggaagtcgtcagtctctttcagaagattgaatacaccaatatcggctatcttgtgccgatcgccgccggcgcgattttaatcaggctgctgctcaatgaaaggctcgccattttaggaagcatcattctggcgatctgcggcagtatgatgtttaatcagggtgtgacgggaacatttaattacgtcatcggcatttactatttaatcagcagcatttcaggcattctgtttttgggaaaacataatgcgagatcaaaaatattgcagacgggactgttcgtctcatttattaatatgattatcgtgctgtcgcttttattaatacaaaatacggcgctgtcaccggttgaaatcggaacgctgatgctgatgggggtcgtctcgggacttgcttcatccgttttgattatcggtctgatgccgttttttgagacgggattcggcattctttcaacaatgaggctgattgaactgtctaatccgaatcatcctctgcttcgaaagattttaacggaaacacccggtacatatcatcacagcgtcatggtggcaaatctgtcggaagcggcttgtgaagccgtaggggcaaacggtcttttagcacgggtcggagcgtattatcacgatctcggcaaaacgaaacgtccgcaatattttattgaaaatcagatgaatatggataatccgcatgacaagctgtctccgcagctcagcaaaaatatcattatcgcacatacgacagacggtgcgaatatgctcagaagctataagtttccgaaagagcttgtggctatcgcggagcagcatcacggaacgtcccttttaaaattcttttattataaagcgaaagaaaagggcgaccagattacagagaaagagttccgctacccggggccgaagccgcaatcgaaagaagcggctattatctcagtggccgacagcgttgaagccgccgtccgttccatgcataatcccaatcccgagcggatcgaaaaactggtgcggggaattatatccgataagcttcaggacggacaattctcagaatgtgatctcacgttccgagaactggatacgatcgcaaaaacactatgtgcgactttaaaaggaattttccactcccggattgaatatccggaggctacgaagaaggtgaaataaatgggtttactcatagatattgttgatgaaacgaacagcgtctcagctgatgcgctccaagaagtggagaagctgctccaattcgcggcggaaaaagaaggcgttcaggatcaggctgaagtatcggtcacgattgtgacaaatgaggaaatcagagaaatcaacagagactatcggggaaaagacactccgactgacgtcatttcgtttgcgcttgaagaagaaggagaagacgaggttgaaatcgtaggcgccgacatgccgcctgttttaggagatattatcatcagcgctgacagaacgaaagagcaggcggaagagtacggccattcatttatgagagagctcggttttctggccgtccacggctttttgcatttgctcggctatgatcacatgacaaaagaagaagaggaagaaatgttttcaaagcaaaaggatttgctggatgagtatggactcacgagatcataaaaacgagtggagcaggttcctgaagagctttgtccatgcatggaggggaatctggaaaacggcgcggtcagagcggaattttcaatttcatattaccgcggcctgcgccgttatcgtttgcggttttttcaccgggctgagcacagccgaatgggccgttgttttgatgctgatcggagggatgcttgctttggagcttttaaatacggcgatagagcatgttgtggatttagttaccgatcagtatcacccgctcgcaaaagcggcaaaggacgcggccgccggagccgtttgcgtctttgccgtgatatcgtgtatcattggtttactcatcttcttgccgaagatatgttagcagaagattcttacaattattttacattgccaaaaatgggcgtgaaaaaccaatcataattatgtaaaataaaagtgacagcggtatcatacaggataaaggtaagagaggaattaagtacacatgaacagacaagaattgattgcagaagcattaaaagcgcgggacacagcgtatgtgccgtattcaaatttcagagtgggagccgctcttcttaccaaagacggaaaagtgtacagaggctgcaacattgaaaatgcggcatacagcatgtgcaactgtgctgaacgcacggcgatattcaaagctgtttccgagggggatacggaatttgcgatgctcgccgtggctgcggatactccgggaccggtttcgccgtgcggagcctgcaggcaagtaatttccgagctgtgctcaaaggatatgcttgttattctgaccaacttacaaggacaaataaaagaaatgactgcggaagaattattgccgggcgcattttcatcggaggatttacatgacgaacgaaagctttaaatcaggatttgtatctatcatcggaagaccgaacgtaggaaagtctacctttttaaacagggtcatcggtcaaaagatcgccatcatgagcgacaaaccccagacgacaagaaataaagtccaaggggtgctgacaaccggcacgtcgcagaccatttttattgatacaccgggcattcacaaaccaaagcacaagcttggcgactttatgatgaaagtggcccagaatacgctgaaagaagttgacttggtgttatttatgattaacgccgaagaagggtacggaaaaggcgacgagtttatcattgaaaagctcggacagacgtccacgccggtctttctgatcgtaaacaaaattgataagatccaccctgaccagctgcttctgttaattgatgagtaccgtacgcgctatccgtttaaggaaatcgtgccgatctcagctttggaagggaacaacgtcgaaacccttctcgcgcagattgaagcgtatttaccggaagggcctcagttctatccgagcgatcaggtgactgaccatcccgagcggttcattatttctgaactgatcagggaaaaggtgctccatctgacaagggaagaagtgccgcacagcatcgctgtcgccatcgagtccattaaagggcaggaaaacggctccgtccatgtcgccgccaccattgtggtcgagcgggattctcaaaaaggcatcgtcatcggcaaaaaaggagcacttctgaaagaagtcggcaaaagagcgcgggctgatattgaagctcttttgggctcacgcgtttacctggaattatgggtgaaggtgcagaaggactggcggaataaaatgtctcagctgcgtgatttcggctttaaagaggatgaatattaattcatctaaggcgtatgcctgaggtgtgagattacctcacagaagcagggattcgttagcaaaatttgtttaacatgaaaaggaggacatcaggtcaagataagggtaagaatttggattgcaaagctagtttaatgatgaaaggtgggttttttgtgttgaattttacctggaacgtattttctcaaacaggaagtgttgatacgtaccttctttttaaagaactggaaaaagagaacctggaaagacccgaagaaccggaagatgagctagcccgaattgattttccaattttgtaaacctcttggcccctcccgttgttggaaggtgcggaaatgctgactaaatgtgaaggaatcgtgctccgtacgaatgactacggggagacgaataaaatcgtgacattgctgacgagggaacacggcaaaatcggcgtcatggcaaggggcgccaggaagtcagccagccggctgtcagcagtcagccagccgtttttgtacgggtcatttttaatgcaaagaacatccggactcggcacgctccagcagggtgaaatgattctcagcatgagaacgatcagagaagatttatttttgacggcgtatgccgcttttatcgctgaactcactgacaaaggaacggaagagaagaaaccgaacccctatttattcgaattgattctcgaatcctttaagaggctgaatgacgggactgacccggacgtgatcaccttcatcgtgcagatgaaaatgctcggcgtcatggggctgtatccggagctgaatcattgtgtccactgcaaaagcggggaagggacgtttcatttttcgataagagataacgggtttatctgccaccgctgctttgaaaaggatccgtacagagttccgatttcgccgcaaacggcaaggctgctaaggcttttttattactttgatatcggaaggctcggcagcgtctcgttaaaacaggaaaccaaaaacgaaattaaacgggtcattgatctgtattacgaggaatattcaggactttatttaaagtcaaaacggtttttagatcagatggaaagcatgaagaaccttttggatgaaaacaaaagttgacattctgcccatctttttatatgatcatttattataaaatatgttgcagtgacagaaagaagtacttgcgtccaactcatacaagcgaccttagggcagtgtaagctaaggatgagcgcgcaacgaaaggcattctcgagcaaccctttaaaaagaggctgagtgattcacatcctcagcaactagggtggaaccgcgggagaactctcgtccctatgtttgcggccggcaagcatagagacgggagttttttggttgccgccgcacttgtaaaagaatggagaaagtggaggtgcttgaaatgaacattcaagatatgattttaaccttgcagaagcactggtcgaatgaaggctgtgtgctcatgcagtcgtatgatgtggagaaaggcgcaggcacaatgagcccgtatacatttttacgaagcatcgggccggaaccgtggagagtggcttacgttgagccgtccagacggcctgctgacggacggtacggtgaaaacccgaacaggctctatcagcatcaccaattccaagtcattatcaagccgtcgcctgataacattcaagagctttaccttgattcattgcgtgcgctcggcattgacccgcttgaacatgatatccgtttcgtagaagacaactgggaaaacccgtctttaggctgtgcaggtctcggctgggaagtatggcttgacgggatggaaattactcagtttacatacttccagcaggtgggcggaattgaatgtaaaccggtatccgttgaaatcacatatggtattgaacgtctcgcgtcatatattcaggataaagaaaacgtctttgatcttgaatggacgtcaggatttactgtgaaagatttatttatgatggctgaatatgagcattccgtttatacttttgaaacatctgacgtggatatgcttttccatttgttcagcacctatgaaaaagaagcgatcagacaaatggataacgggctcgtgcatccggcctatgattatgtgctgaaatgctctcacacatttaatctgctcgatgcaaaaggcgcgatctcggtgacagagcggacgggttatatcggccgtgtccgcaacttagcgagaaaagtggcaaaaacgtattatgaagaacgggaaaaattagggttcccaatgcttaaagaggagggctcttcccatgagtaaacaagacttgcttttagagatcggactcgaggaaatgccggcgcggtttttacatgacagcatggtgcagctcggtgaaaagctgaccggctggctggctgaaaaaaatatcgcccacggcgaagtgaaactttttaatacgccgagacgtctggcagtatatataaaagacgtagcagaaaaacaggctgatattcaggaagaagcaaaaggcccggcgaaaaaaatcgctcaggatgctgacggaaactggacaaaagccgctatcggattttcaaaaggccaaggcgccgaagtggatgacctgtatataaaagatgtaaacggcacggaatatgtcttcgttcaaaaattccaggcgggacaagaaacgaagacacttttaccgcagctggaaaatttgattgccggattgcattttccgaaaaacatgcgctggggcacgcaggatctgcgctatatccgtccgatcaaatggattgccgccctctttggaaaagacgtcattccgtttgaaatcacaaatgtcgagacgggccggaacacgcagggacaccgctttctcggccaagaagtatctgttgatgcgccgtcatcatacgaaaagctgctgaaagaacaaagcgtcattgctgacccgaaagaacgcaaacaaatgatccaaacccagctggacgcacttgcggccgagaagaaatggaatattccgatcgatgaggacctgctgaacgaagtcaaccatctggtggaatacccgacagcgctttacggatcttttgaatccgaatttctttctatccctgaagaagtgctcgtgacaacaatgaaagagcatcagcgctacttcccggtaaaagatgaaaacgggaatctgctgcctcattttattacggtaagaaacgggaacagccatgcaattgaaaatgttgcccgcggaaacgagaaagtgctgagagcaaggctttcagatgctgcgttcttctacaaagaagaccaaaagctgaacatcgatgaaaacgtgaagaaactggaaaatatcgttttccatgaagagctcggctcccttggagataaagtaagaagagtggccgccattgcgggcaaacttgccgtccgcctgaaagcggatgaacagacgcaaaaacttgtgaagcgcgccgcagaaatttctaaatttgacctggttacacatatgatctatgagttccctgagcttcaaggcgtaatgggagaaaaatatgcgcgcatgctcggtgaagatgatgccgtcgctgccgctgtcaatgagcactatatgccgagagcggccgggggagaagtgccttcaacctttaccggcgcggtcgtggcgttagctgataaactggacacgattgcttccttcttcagcattgacgtaattccgacaggttctcaggatccgtacggattgcgccgtcaggcaagcggcatcgtttccattctgatcgaccgcaattggggcatttcgtttaaagagctgctgtcattgacagaaacggaaaaagaaaatgagctccttgatttctttacacagcgtctgaaatacgtcttaaacgctgaagacatccgtcatgacgttattgaagccgttctggacagcacagagcttgagccgtatgcagccgttcataaggcaagagtgcttgagaagcacctcggcacacccggcttcaaagaaacggctgaatcactcggccgggttatctctatcagcaaaaaaggcgagagccgcgatgtcaagccggatctgtttgaaaatgaacaggagaaaaagctgtatgacgcttatcaaaaaacaaaagacagtgtcgcggaaagctttgcctccaaaaactatgaacaggcgcttgctgtgctcagcggattaaaggagccgatcgaagaatactttaatcacacgatggtaaatgcggacgatgaaacattaaaaaccaaccgtttagcgcaaatgaccgctcttgcagatgtgatcaagtcttttgctaatatgaatcatcttattgtaaaataaagaaaaagacggttgctgtgtgatcggcaatcgtcttttccccttttacataaacatcacagaatgaaaacatagataaagaaacccttccataaaggtggtgagtacgatcgaattaaataaacggcaagaacaaattttacagattgtaaaggaaaacggcccgattaccggagagcatatcgcagaacagctcaatttaacgagggccacgctgcggccggacttggccatactcaccatgtcaggcttcttagaggcacgtccgcgggtcggttatttttatacggggaaaacgggaaatcagctgcttgcggataaattgaaaaagctgcaagtgaaagattttcaatcgatccctgttgtcatcaatgaaaatgtctcggtatacgatgccatctgcaccatgtttttagaagatgtcggcacgttatttgtcgtagatcgtgatgctgtcttagtcggtgtgctgtcacgcaaagatttgctgcgggcgagcatcggccagcaggaacttgcctcaataccggttcatattatcatgacaagaatgccgaatatcgccgtctgccggcgtgacgattatgtgatggacatcgccaagtatttaattgaaaaacagatcgatgcccttcccgttattaaagatacggataaaggctttgaggtcatcggccggtttaccaaaacgaatatgactaagatacttgtcagtttatcagaaaatgaaatcatataagcttgaaaactaacggggggataacatggacaatcgcatcatttatgtagtatcagactcagtcggagaaaccgccgaactcgttgtaaaagcctcgctcagccagtttaacggctcagccgatgatacgcatatcagaagaataccttatgtggaagatatcggcaccattaatgaagtcgtgtctctcgccaaagcggacggcggcattatttgttttacgctcgttgttcctgaaatgcgcaaatacctggttgaacaagcggaaaaagcgaatgtgctgtattacgatattatcggtccgctcatcgataaaatggaatcagcttacggtctgaccgcaaaatatgaaccgggccgcgtccgccagcttgatgaagattatttcaaaaaggtcgaggcgatcgagtttgccgtcaaatatgacgatggcagggatccaagaggcattttaaaagccgatatcatcctgctcggagtatccagaacgtctaaaaccccattatcacaatatcttgcccataagcgtctgaaagtggccaatgtgccgatcgttcctgaggtcgatccgccggaagaactgttcagcgttgatccgaaaaaatgcatcggcttaaaaatcagccctgataaactgaaccatatacgaaaagaacggttaaaatctctcggcttaaatgacaaagccatttacgccaatatcaacagaattaaagaagagctggagtattttgagaaaatcgtggaccggatcggctgccaagtcgttgacgtttcgaataaagcggtcgaggaaacagcgaacatcattcatcatctcaaaacaaagggccgataactcaggacgctttatcctgggtttttgggtatgcaaatagggaataaacaaaaaggatggcatcttcacgaagtttgtattataataaaaaattgtgataaaatgtttatttttaggtttaagcttcgtgtgatacgaataaactattatgggtaagatgtcaagaataactcccggaaatttttcgacaaagctcaaaatagatccgcagtcatggagcatatgcgatttcgcttgtttttatgcaggagattgatggagggatggagaattagtcttctaaatgaaaaagaaaagacgatttttgtcgatgcagacgcatgccccgtaaaagaggaaataatgctcattgcatcgcaatacagcgttcgggttattttcgtcgcatcatttgaacactaccagctttccagaagcaaagacgagaactgggtatacgttgatcctcataaagaagcggcagatttatatatcgcaaaccatgtgagatcgggagacgtcgtagtcacgcaggatatcggtttagcctctcttttgctgaacagaaatattgccgtcttatcggaaaggggccgttcttatactgaagacacgattgacttcgctctgatgagccgtcatatgtcaggcaaaatgagaagaagcggcattcattccaaaggacctaaaaaattaaataaagaagatcggaatcgatttgttaccctgcttaaaaaaatcctgtcgaatgatgaagggatttcaaatcaaagcatcgaataatgtacgacggagtgttataagatgggaaaccgcataccagatgaagtagttaatcaggtgcagcagtcagcagacattgttgaagtcataggtgattatgtccaattgaaaaagcaaggccgcaactactttgggctctgtccgtttcacggggaaaacacgccctcgttttccgtctccagcgataagcagatctttcattgcttcggatgcggtgcgggcgggaacgttttctctttcttacggcagatggaaggctattcatttacggaagctgtttctcaccttgcggataaatatcagattgatttccctgatgatataacgattcactctgcatccaggcctgaatcttccggagagcagaagatggcggaagcccacgagcttctgaagaaattttaccatcatttgctaataaatacaaaggaaggccaggaagcgttagattaccttttatcaaggggttttacgaaagagctcatagatgagtttgaaatcggctacgcgctggattcctgggatttcatgacgaaattcttgaaaaagcgcggttttgaggaagaactgatggaaaaagcgggtctgctgatcagaagggaagacggcagcgggtattttgaccgtttcagaaacagaattatgtttcccattcatgatcaccacggagccgtggcggctttttcaggaagggcgctcggaagccagcagccgaaatatatgaacagcccggaaacgccgctgtttcataaatctaagctgctgtataactttcataaggcgcgcctgccgatcaggaaagaggagagagccgttctgtttgaaggattcgctgacgtcatatccgccgtcagctcaggcgtaaaagaaagtatcgccacaatggggacgtcgctcaccgaagagcatgtgaaaatcctcagaagaaatgttcaggaggtcattctctgctacgattcggataaagccgggtacgaagctacgctgaaagcggccggcctgctccagaaagccgattgtaaggtaagagtaagcatgctgcctgacgggcttgatcctgatgattatatcagaacccggggcggagaaaaattccggaccgatatcattgatgcaagcgttacggtcatggcttttaaaatgcagtatttccgcaaagggaaaaacttatctgacgaaggagaccggctcgcttacatgaaagaagtgctgaaagaaatcagcgctctttccgggtcgcttgagcaggaaatgtatgtgaagcagctcgcctcggaattttctctttcggtagaatctttgacggaacagctttccatctacgccagacaaaacgcccccggcgacaaaaacgaaccgcagacaagacgggcccgggtgacgacaaaagcgaaacggcgccgtctccgtcccgcctatgagaacgcggaaagacttctgctcgctcatatgctgagagaccgaaacgtcataaagaaagtgattgagcgtgtcggctttgaatttaacattgacggacatcgtgcgctggcagcatacctgtacgctgtatatgaagagggggctgacatgacgccgcagcatcttatggcgagaatgcaggatgaggaaatcagccagctgctttcagatatagggatgctccaagtaaacgaggagctcacagaggccgagttatccgattacgtaaaaaaagtgttggatcaccgaaaatggtcaatgataaaggaaaaagaagcagaaagagcggatgcggagaggcagaaagacttcgtgaaagctgcgtctctggctcaagaaattgttgcattgaaccgatcattaaagtaacaccaaaaagaggcttgcgttctgattggcaatgattccttgcggaggagcaaatagatcgcttaacctcatcatgaattgtcatttattatccgcagccctgcatgctgaaaaagagagaaggcttccggggcggataagaaacataccgcttttagaattcgttgcaagctttggaaggagggatccataatggctgataaacaaacccacgaaacagaaacagaacttacattagaccaggtaaaagagcagcttactgaaactggaaaaaaacgtggcgttttaacatatgaagaaattgctgaacgcatgtccagctttgaaattgaatcagaccaaatggatgagtattatgaatttttaggagaacaaggtgttgaattaattagtgaaaatgaagaaacggaagatcctaatattcaacagcttgccaaagccgaagaagaatttgaccttaatgacctcagcgtaccgcctggcgtaaagatcaatgatccagtccgcatgtaccttaaggaaatcggacgggtaaatcttctttctgctaaagaagaaatcacctacgctcaaaaaattgaagagggtgacgaggaatctaaacgcagactggctgaagcaaaccttcgtttagttgtcagcattgctaaacggtatgtcggccgcggcatgcttttcttagacttgatccaagaaggaaacatgggtctcatgaaagcagtcgagaagtttgactaccgtaaaggatataaattcagtacgtatgcgacttggtggatcagacaggcgattacacgcgccatcgctgaccaggcgagaacaatccgtatcccggttcacatggtggaaaccatcaacaaattaatccgggttcagcgtcagcttcttcaggatcttggcagagagccgacaccggaagagattgctgaagacatggatcttacgcctgaaaaagtccgtgaaatattaaaaattgctcaagagcctgtttctttagaaacgccgatcggtgaagaagacgactcacatctcggtgacttcatcgaagaccaggaagcgacatctccgtcggatcatgcggcatatgagcttttaaaagaacagctggaagatgtgctggatacgttgacagatcgtgaagaaaacgtgctgcgtctccgtttcggtctggatgacgggcgcacaagaactttggaagaagtcggcaaagtgtttggagtaacgagagagcgtattcgccaaattgaagcaaaagcgcttcgcaaattgagacatccgagcagaagcaaacgtctgaaggattttctcgaatagaatggaacgggtctttttgatccgttcttttttatgtataagatatatggataatatacctttattttactggataagcatatgttttgcaaatgagttcggaaaaaatgcggcatgtcctgaaagggggaaaatgagataaatttatttatattctttattgtaagcgtatacaattcattatacaatagaataaagataattttgtgataaacaaaacagttattttgctttttgtataaattgtgaaatcaatgaaattgctgagcaagaccatttactttttgtaaaaataagttagaattagaagtgtttacatagggggagaatgaaaaagggggatggagatatgaagtggaatccgctgattccttttttgctcattgcagtgctgggaatagggctgactttctttttagctgtaaaaggcaatggagatgcgcatcagatcgcaagcggcggtgaaagcaaaaatgccgagaaggaaactgcaaacgcttcacctgaagagatttataaagcgaactgcatcacctgtcacggggaaaactatgaaggtgtgtcagggccgaacttaaaaggcgtcggcaaaagaaaagatgtcgctgagattaaaacaaaaattgaaaaaggcggcaacgggatgcccgcgggtcttgtgccggccgaaaagctggatgacatggcaaaatgggtttctgacattaaataaagctttaccggtccctatataaaagacatatgaaaaactctatccgccgcttggattccgggcggtttttttatatgatagtaaaggaaaaagaacctgagaaaagttgtgatattgtgaatgaaatgaagttatctaaaagattgcagtctgtggcggaatatatccctccgggtgccctggttgctgatatcgggtcggaccacgcgtatcttccttgctatgccgttttgaatcatttggcaagccgggcaatcgccggtgaaattacagatgggccgtatctatccgccaaacagcaggtggaaaaactggacttaagcactcttatctccgtaaggaaaggtgacgggctgagcgtccttgaaaaaggagaagccggcgccattacaatcgctggcatgggcggagcgctgatcgctcatattttggagtccggaaaaacgaaattgacggggcgtgaacggctgattctgcagccgaatattcatgccgttcatataagagagtggctgtatcaggaaggctatgaactgattgatgaagtgattctcgaagaagacggaaagtcttatgaaatcctcgttgcggaaactggcgaccgtgatgcgccgtatcgggacgtgccgatggctgccggaatgcttgcgggtccgtttttattaaaagagaggaatgaagtgtttcttcggaaatggagccaggaacttaagcatactaaacaaatttatgaacagatcagccgcagcgcaaagcatgaaaatcatgaaaaattagctgaattgaaagagcggatctctctgctgaaggaggtaatcggacatgcctaaacatgtaaacggacaggaaatcatccagctgtttgaacaattttcaccgaaggcttttgcggtggaaggagataaaatcggcctgcagatcggtacattgaataagccggtgaaaaatgtcatggtgacattggatgttctggaacaaacggtagatgaagccattgagaaaaaagttgacttaattatcgcccaccacccgccgatttttcggccgcttaaacagatcaccactgatcagcctggcggaagactgattgagaaatgtataaagcatgacattgccgtatatgccgctcatacgaatcttgatgtggcggacggcggtgtgaacgatctgcttgccgaagctctcggcctgacagacacagaggtgctcgtcccgacatattcggacccgctgaaaaagcttgccgtatatgttccgaaagactatgaagaagctgtaagaactgcacttggcaacgccggagcgggacatatcggcaattacagccattgcgcgttctcctctgagggaatcggcagctttaagccgctggacggggcagaaccgtttatcggacagacgggagaactggagctcgtccatgaagtgagacttgagaccgtttttccggcaagtatggagagaaccgtcgtaaaagcgctgaaaaaaagccatccgtatgaagaggtggcatatgatatttatccggtggagcagtctccgcttaaaaaagggctcggccgcatcggaaaacttcagcaagacatgacgcttgaagagtttgcgctgtttgtgaaagaaaagtttgacgttaacggagtccggatggtcggagagcgaaacagcaaggtgaaaaaagtcgcggttcttggcggtgacggaaataaatatatttatcaggcaaagtggaagggtgcagatgtttacgtgacaggcgatctttatttccatgtagcgcatgatgcgatgatgatgggattaaacgtcgtggacccggggcattatgctgaaaagatcatgagaaaaggcacggctgagaagcttacggcaatggccggagagaaaaactatgatgtgcgcattttcgcttccgaaacagatacaaacccatttaccttcttataaaaaaactgaggccccgggcctcagttttttatttttactttcggaaggatttttttaagcggcacactgtgttcaagctgccatgtcgattcatcgttgtggtcaaactgctctaaaaagcggatgacttcctttgtaatcggtgtcggtgttgatgcgcctgcggtaacggcgacggtattgacgtctttcagccattcgagcttcagttcactgatgtctccgattcggtaggcttttgttccggcgatttcttctgacacttgcgccagtctgttggagttattgcttttcggatcgccgacaacaatggttaagtccgctttctttgcctgctctgagacagcttcttgacgaacctgtgtagccaggcagatttcctgatgatattccacgtgcgggtacttttcttgaactgattccataatatcatggacgtcccactgggacatggttgtttggtttgtaacgattaatttctcagcctgaatatcgaggtttctcacgtcttcctctgtttcaacgagatgaacgatttcaggagcgacgccgacggctccttcaggctcggggtggccttttttaccgatgtatatgacgtgatagccttcagcttttacttttcggattaagtcatgtgttttcgtgacgtccgggcatgtggcgtcaatcgtaacaagccctttttcctcagcggcttttcttacttccggagataccccgtgagccgtgaaaataacggttcctttttccacctgctttaaaatctccagacggtttgtgccgtcaagcgtgtaaatgccgtcttcctcaaacgcatctgtgacatgcttattatgaacaatcattcccagtatatatataggtcttggcagtgttttatcgagtgacgcgtttttggctatgaccatggcatcaacaacgccgtaacagtagccgcgcggcgatattttgataacgtccaatgtagatgtcctcctatcaaaagtgagtgtagaggcaatataaaaagccgtagttaaacggctcaaatcttgcattcttctgatctcattatagctaatctttcgtgagatatcaaagaatgttaaatatataatttcggctttgatctgcccgatgttctttttggacgcggctgttccgctgagtccgcctgtgcggcgtctttttcttttgaagcggatgctttttcggacgtcttctttgatgttttggatgaggcgtctgatttggtttcatcttctgtttcatctgttttttcagcttcatcctttttgtcctgttcgtctgtttctttcgtctcgtcagattcattctcgtcatcactgctgcttaattggctgtaaagcttcatcatggcgggcagactccgtactaaaggaccgtactgctggatcatcggcgtaacctgctgcgccacgccgagcaccttctgaacgttgccgagcatgctcgacagggatgccggacttgccaggttctgtattccctgcagtcctgcacctgctcctccgctggccgccgccggtgccgacgcggcagcgcttcctcctcctgaaccgggtaaaaaacgggaaagcatcccttttaagccccctccgccgcccgtgcctgcgtttctcaggcccgctccggccatctgctgctgagggaaaagctgccgtccctgctgcatcagctgccggcccggcaatgacggtcttcctcccatcatcatacgcggattcataaacggccggccctgctgcgccatatttctcatcggctgctgtggaaacatacttgtacctcctttctgtctctctgctattacaatatgcatcggggggggcatttgcttttctgtctcgaaaacaggattcccccaagacatggtgtttttaagtaaaatcggttataatgtgatgatggacacagaatgtgccgctttaaggagctgggaaaaatgaaagaaactaaatttgatggatacaatttaaaaccgtttattatagatgcagttcaccgccttggtttttatgaaccgacagatattcaaaagcgtctgatacctgccgtactgaaaaacgaaagcgtgatcgggcagtcccagacggggacggggaaaacccacgcctatttattgccaattttgaatcggattgatccgggttctgatacggtacaggccgttatcacggcgccgacgagagagcttgccaatcagattcatcaggaagcgctcaaaatcacacagggtgcggaagatgagccgatccggacaaaatgcttcatcggcgggacggacaagcaaaaatcaattgataagctgaaaacacagcctcatctcgtcgtcggaacgccgggccggatcgcggatctgattaaggcgcaggcattgaacgtctataaagcgcagtctctcgtcattgacgaagctgatctgatgcttgatatgggctttttagaagacgttgattacatcggggcgcgtatgccggaagaactgcagatgcttgtgttctcagctacgattccggaaaagctgaagccgtttttgaaaaagtatatggaaaatccgaagtacgcgcatgttgagccgaaaagaatcacagccgaaaagattgaacatgtgttggttccttctaaacagcgtgataaagacaaactgctttttgatatgatgtctcatctgaacccttatctgggcattgtgtttgcaaatacgaaaaacacggctgaccatattgcgaaatacctgactgaaaaaggaatgagagtcggtcttctgcacgggggattaacgccgcgtgagcgtaagaaggtgatgaagcagattaatgatctggaattcacttatgtcattgcgacagaccttgcggctagaggaattgacattaaaggcgtaagccacgtcatcaactacgagcttccggacgatctggatttttatgttcaccgtgtcggaagaactgcacgcgccggttcatcaggccaagcactgaccatttatgagctttctgacgaagatgcgctcgcaagacttgaaaagatgggcattgtgtttgactatgcggagcttgtaaacggggaatggaagaaaggcgatgaccgccaccgccgtaaaaatcgcaaaaagacggcaaatgaggctgaccaaattgcgaaacgcctcgtgaaaaagccgaaaaaagtaaagccgggctataaaaagaaaatgagctacgaaatggaaaaaattaaaaagaagcagagaagaaacaaatctaacagaggaaagtagggggaatcgggttgctgaaaataggctcacacgtctcaatgagcggaaaacatatgctccttgccgcaagcaaggaagctgtttcgtacggggcgaatacatttatgatctatacgggcgctccccaaaacacgcgccgcaaaaaaattgaagacttgaatatcgaagcgggccgcgcccatatgaaggaaaacggtatcgacgagattgtcgtgcatgcgccgtacatcattaacatcggaaatacgacaaatccggcaacatttgagctgggcgttgattttctgcgttctgaaattgaaagaacagcagcgatcggcgcgagacagatcgtgcttcatccaggagcgcatgtcggagccggagctgaaacgggcatcaaaaaaatcattgaaggtctaaacgaagtgattgttcccgagcaaaacgtgcagattgcgctggagacaatggcgggcaaaggatcagaatgcgggagaagctttgaagagctggccgagatcattgcgggagtcacgcataatgaacatctatccgtctgctttgacacttgccacacccatgacgccgggtatgatgtcgctaatgattttgacggtgttcttaacgagtttgataaaatcgtcggcatcgatcggataaaagtccttcatgttaacgacagtaaaaatattaaaggcgcccggaaagaccgccatgaaaatatcgggttcggagagatcggttttgacgctctgcagtacatcgttcatcacgagcagcttgccgatattccgaaaatcctcgaaacaccgtatgtaggcgaagacaagaaaaataagaagccgccgtaccgttttgaaatcaaaatgctgaaagaaaaacagtttgataaggagcttcttgaaaaaatatcagctcaataagaaagaaaggaggggcgggtgtccctcctttcttaccctgagaattgattgaaaagttcgtcaactttccgcgccgtttcttttgaggttatcgtttccacttttttcaggaggcgcagccgctcctgttcatcaaaaatattgatgttttttccgtgcatcagagccgctacctcagccgcttgactcctcgtaatgctgattccgtattgcttggaatatttcagcagatcgtccgcagtgacttgattgagccgctgcaaaataattctttgtattaaaatcatcgatactttcacctctttagacataatgtattgagcagatcattaaaatgttacagcttttaatggtaaaataaagttgcttactgtttaaaatagttattataggaaaggagattttatgaccccaaataaacagcataaaagagaatcatttttacactttatcttcagggtcattatgattctgatcggggcgggttcagccgccgtaagtattgaattgtttctggtccctaataattttatcgacggaggcattatcggtgtttcattaattttagaccacctctttatgtccaatcccctcctcaattttgccttattcgttgtgttactcaacattccatttatgattttcggatataaatatatcggaaaaacatttctcatctctactgttatcggaatcgtcggtttagcgctgattgaatcctcattgcaccatgtggaggccattacgacccagcctattttggcgacggtattcggcgggcttttgctcggtttcggggtaggccttgtcatccgaaacggaggctcgatggacggtactgaaatcctcggtatccttctcacgaaaaagctgcccttttcagtcggggaattcgttatgctcatcaatgtgtttattttcatttgggccggttttgtgttcggtccggagcaggcaatgtattctttcatgacttattatattgccatgaaaacgattgacgccgtcatccaggggcttgatgaaacaaaagcggtcattattgttgcagagcaatatgctgagatctcagatgctatattgcaccggcttggacggggaaccaccaagcttcagggcaaaggcggatatacggatgaaaccaaagaagtcatttacgcggtcgtgacaaggcttgaagtgactaaattgaaatccattgtgtttgaaattgataaaaacgcctttattacgatcatgaatacccatgaaacgagaggcggtaagttcaaaaccgcgattcactaggctttcatttacttttcatcattttataggtataatttgatacatcataagaaaatggcctgctgttcagacagctgccattttctttttggagcgataccgtgttgtaaaggggaggtcctcatgaacgtacaagaagcgttgaacctgctgaaagaaaaagggtataaatatacgagtaagcgagaagacatgctgcagctttttgctgattctgataaatatctgaccgccaaaaacgtgcttgccgcattaaatgacgactatccgggtctgagctttgataccatatacagaaatctttcgttatatgaagaactcggcattttggaaacgacggagctttccggagaaaaactgttccgttttacatgctcttatacccatcatcatcaccattttatctgtttaacctgcgggaaaacgaaggaaattgagtcctgtccgatggataagctgcacgatgatttggaagggtatgaaatcagcggccataagtttgaaatttacggcacctgtccggcgtgccgataaaaaacctcctgcttatacaggaggtttttttcagcttttgacatgctggaagctatgtttgtttttattaatccaggcgacggcttcaagccaattctgcaccctgataatattggaatcgatggggagctgattatatggggagttaaaaaggataaccggaatgcctgcttcttttgcgatcattgtcgcattgccgtggtgatcttcgaaaaataaatcaatgccgtgttttttgacggcttccactttgtgatggcctccgacaagctcaatgtgatcgtaatgaatgtcccggtttgcaaaccagtccagcgtaacatcttctaagtggccgcgtcttgccgtaatgtagatcagacggtgctcttctttcagtccgtccagtgcctgcttggcaaattccgcgagcttcgcttctttatatatggctgcttcatgaacgttcatccattcccaaaattcctcgtctgtaatgttcaaaagcttcgtcagatcataatcagtcatatcatccaaggtaatggaaagatgaaatgagcggtttaaataagggacaaatgtatcctgtgccgtaactgtgccgtcaatatctatacctaaccgtaacatgtccacactcctataaattcatcccttcaagtgtaacataaacaattaacaataccagaaaagtttagcaaacatgaatccgtaaaaaacgcggaaactaaaaaagctcctttcataaaagaaaaagggggaattgaaggtggcatacgattacgaaaatcgaaaaggcaacgactattatgtggatcatggatcggaaggaaccgatatcacgcgtgatgtttattcagaagaaacagcggctgaaatttcagagccatatcgtgcttctgaccgggcagcagaccgtgatgataaccgggacggagtaagtgaaggccgggggatagggtatgcagcattggctatttctatcatttccctgtttgtgctccctgttttattaggggcatgcggcattatcgtcggctatatcgccagaagaagaggagcaggcgctttaggcggatgggcgatgggaatcggtattgtttcccttgtgctcggcatcttcattacaccgtttttttaacacaacgcaaaaaaaaagcttggcggaatatccgtcaagctttttgtgtttcttgttctgcttttgctttttccgcttcaagctttgcgtagtgttcttctgccagcttgtcgatttcttttttcagctcttcgaccatggtttcttcagggactttgcggacgatttggcctttgcggaacagaagtccttcgccgcgcgcgccggcaatcccgatatcggcttctcttgcttcacccggtccgttaacggcacatccgagaaccgctactttaatcggcgctttgactttagaaatgtattcttccacttcatttgcgatgctgatgagatcaatttcgatccgtccgcatgtcgggcatgaaataagcgtagccgcgtttgaagcgagaccgaatgatttcagcagttctctggctacttttacttcttcaaccgggtcggcgctcagagagatccggagcgtgtttccgattcctttgcttaaaatcgctccgagtccggccgcgctttttaccgttccggcaaacagcgtgcccgattctgtaattccgaggtggagcggataatcaaatgcttttgacgctttttcgtatgcttctatggcgagattgacgtcagacgctttcatgctgacgatgatgtcatgaaagtcaaggtcttccaggattttgatatgatgaagcgcactctcaaccattccgtcagcagtcggatagccgtatttttctaaaatgcgcttttccaaagaacccgcgtttacaccgatccggatcggaatacctttttctttcgccgcttttacgacggcttccactttttcgcgccggccgatgttacccgggttgattctgattttgtcggcgccgccctcaattgcttttaatgcaagcttgtagtcaaaatgaatatcgacaacgagagggatggaaatttgttttttgatgtcggcaatcgcgttagcggcgcgttcgtccggacatgccacccggacaatttggcagccggcttcggctaaacggttgatttccgcaactgttgcttctacgtcgtgtgttttggtcgtcgtcatactctgaatgacgacttcgttatttccgcctattgttaaaggtcccactttgacgggacgcgtttttgtacgatgtgtgatttcactcacttgtcaatcgctccttaattgtagttaccgcttttgcaggctgagccttttacatgtcaggcaacttctatttacatgttatattgtaacagtgtatttgccgaactgacaagaaattaacgtttaattgcggtagacggggaatttataagcggtgcctgcccgaatggcgtttgcttttacattcggattcagcgcttcaaaatcttgtgcaatatcatctggcgctttatgtgcgccgactatcgacatcactgtatcgccttttttgaccgtaaccgttctgtatgaggcttcctgttgggctggctgtgccgccgctgcgtatgctggaaggtcttgagaagggatcgtgccgattttaagatcgtaaaagataatgaatatcacaaataaactgccgaatacaaaagtaagccgcttcattccaaccgcctcccgcatacatttttacttcattgtatgcttgtcccattttgttcatgacaaaaaagaagaccgccgggggcagtctttgttacacagctgtttttcttggcggtatctcttttaagacgaggaaaaggatgataaagtttacaaaccaattcactaaaaattcactcggcaccgtaataacaagcgcgcgcatgatcgtaaagaatatggtcgaaagtgtaatggaataagccgaaagcttccagagctgctggtaattcaatgtctttctttgcgcatttttcaatatcaggccgataacggcgagaaatgatacttcaatgaattttccggccgctgtcatgatgaacagcaaaacggacaggacggtgacgatcattgttttattttggtttaatgctgatatgatttctttttttgtgatatcagcaggcatcagcgaataattcatttctgtcgcctgtccgtctacagcaagcaccattttatttttcaaaatgccgatcgcattttgtttcgccgctatttgtttcgcgccgtaagcatctgtcggatcaaacacgatgacaaagccgttcgcttccgtttccttagaggcggacgctttcgtctgcaattctccgtttgaaatgctgaaatcagggaaatctttctttaacacggttttgaaaccattcattgagtttacggtgccggagcaaaggtaataagcgcttggcagcgtaaaaaggacagacagcaaaaatacataaaggatcgcttttcctatcccctgaaaccgtgtttttgcaatatccgccggagagtatgtacttttcaataaagccgtaaatatgttcaacatcttcacttcctagcctaaactggtatatgttgcttattgtatcgttcacaggggatgaacacaagtgagagtatttaaagcggtgataaggaatcatacataataagataaagcgggaagctgtgatcgcccgcaaaaaaaaggagggtgtttttgtcatgagtgttttgtattggctgattatcattgcggtcttcgtcattgcttttatcggacttgtatatccggtaattccaagcgttatttttattgtggccggttttcttctctacggatttttgttttccttcagtccttattcttacctgttttggctcattgaggcggtatttgcggccgttttattcgcagctgactatgtgtcaaatttacttggcgttaaaaggtacggaggaagcagggcggcgatctggggaagcacgatcggattattgatcggacccttcgtcattcccgtggcaggcattatattaggcccgtttatcggtgctgtctgcgctgaggtgtttgttcatcaaaaggatatcaagtccgcggcaaaagtggggctcggctcgttaatcggctttttaacaagcgtcgcggcaaaaggcgtcattcagctctttatgatcggatatttcttatggacggtgctttagaaaggtttaatttcggccgtgaacggataaagtgtaatatgtctgctggaatcgccggattgtgagctttttcattgattaccacgctttcttttgttacattgagattagaaaagttcgcgttaagcggcatttcagtacatatatttaaaggaggaaaaaattatggcttacaaacttccagaattgccttacgcttatgatgctttagaaccgcatatcgataaggaaacaatgacgattcaccatacgaagcaccataacacatacgtgacaaacctcaacaaagcgatcgaaggatcagcgcttgcagagaaatctgtagatgagcttgttgctgatttgaacgcagtgccggaggacatccgcacggcagtccgcaacaatggcggcggacatgcaaaccactctttattctggactcttttatctccgaacggcggaggcgaaccgactggtgagcttgctgaagagatcaaaagcacgttcggaagcttcgatcaattcaaagaaaaattcgcggcagcagctgcaggccgtttcggttcaggctgggcttggctcgttgtaaacaacggcaaacttgaaattacaagcacgccaaaccaagattcaccgctttcagagggtaaaacacctgttctcggtcttgatgtttgggagcacgcttactacctgaactaccaaaaccgccgtcctgattacatttcagctttctggaatgttgtgaactgggatgaagttgcccgtctttacagcgaagcaaaataattgagttgaatgatcacaaggtctcccgcggggggccttgtttttttattgactttgattccttttacatatctcagtttgagtgagacaaactaatgtgtagtaaaggggagtcaatgatgagcaaaataaaaaaaattatcggcgacatcgaaataaataaagggctgctgctgttattgacgattggcggcctttactcattgggcatcgcgctgtcaaatacatttgtcaacgtgtatttgtggaagcagtcgggaaaatttattgatttggccatatacaatttgtcggtcgtaacgatgcagccgattacctttctgctggctggccggctggctaaaaaaattgacagggtgtttattctcaggttcggcgttatctttttggccgctttttatttaagtgtgctgcttgccggagaaactgcggcttcccgtctcgttttgataggggccgtgctcggagtgggatacggcttttactggctggcttttaatgtgctgactttcgaaatcacggaaccggaaacgagagatttttttaacgggtttttaggcattttgtcttcatcggcgggcatgatcggtccgattgtggccggatatgtcatttcaagacttgaaaacaatacgggttatacaatcattttcagcctgtcgctcggcttatttgcccttgccgtggtcatgagcttttttctgaagcggagggagtcgaaaggccggtttatgctgaaaaaagtttttgatgagcgccacacgaatctgaattggcgccggattaccaacgcgcacttttttcaaggcttgagagaagggatttttgtttttttaatcagcgtatttgtattcattgcgacaaacagtgagctggcgctcggaacattcggcctcgtcaattccgcggtttctttttttgcttattattttgcatcaaggctcatcaaaaaaagagcgcgaaaaaaggcgattcttatcggcggattgatcttgtacggcgccctgtttctcatcatttttaaaatgagcttcacgacgctccttttgtacggagtgtttattgcgatcggctatccagttctgctcgtgccgtatgtctcgcttacatatgatgtgataggccgggcgcggcttgccagaaaagccagaattgaatacattgtgctcagggagttatttttaaatgcgggccggatcgtttctatcctttgtttccttgtaatcgttacattattcaaggaaaaagtgggaataccggcggcgctcgtgctgctcggagccggccatccgctgatttattactttataaaagacatcaaactggatacggaaacttctgatgaaacagtagaagaagaccgacaaaaacaggcggcggaaccgaattttataaaaggagaaagataaaagggttatctgtagaaaaatatcgaaaaaacctttagaatgaaaaatggcacctgaacagaaggtgtcatttctttctgtaaataagaaaaggtgatgtcatgaggagaaataaaaagaaaatagctgtaaacaaagaaaagaaaaaatcactgccgatccggcttaattttttgtttttggccgcgtttcttattttcacttggattatcgtcgagcttggcatcaagcagatcgttcagggtgatgattataaaaacgccgctaataagcaggaggagtctgatgtcagcacggcggttccgagagggaaaatatacgaccggaacctaaatcccatcgtaacgaataaagcattaaatgcgattacatatacacgttcagcctcaaccacccaggcgcagcgtttaaaaatcgcaaaaaaactgtcgggtatgattaaggtaagcaccaaaaaggtgactgagcgggataaaaaagactattggatgttaacgaggcctgatgaagcgaaaaaactgattacggccgaagaaaagcaaaaagctgaagacaaaaaactgtctgacgatgatttatatcagcttcagctgaaacgcatcacagacaaacagctgaatgaactcacttcaaaagacatgcagatccttgcgatcaaaaggcagatggattcaggctactccctgacgcctcaatacatcaaaaatgaaggcgtgtcggcaaaagaaatggccgtcgtcagcgaacatttagatgaactgccgggagttgacgtgacgtctgactgggaacggtcttatccttataaaagcctgatccggacattgctcggcagtgtatccagttcgaacgaaggtcttccgtctaacctgctggatcactatctgtcactcggctacagccggaatgacagggtcggaaaaagctatttagaatatcaatatgaaagcctgctgcagggtcaaaaagagaaagtgcagaatttaaccgactcatccggaaatgtcacgggcagcaaagtgatttcaaaaggacaggccggcaaagaccttgttttatccattgatatggacctgcagaaatccgttgaaaaaatcattgagaaaaatttaagatcggcaaaagcgagaccgagcacgaagcttcttgaccgggccttcgtcgtcatgatgaacccgaaaaacggagaagtgctgacgatggccggcaaacagattacgaatgaccatggaaagtacaaaattaatgattatgccctcggcgcaatgacttcctcctatgcaatgggatcggcggtcaaaggagcgacggtgttgaccggactgcagacgggcgcgatcaatttgaacaccgtttttcaggatgaacctatgtatttcaagggaagtaaaaacccgaaaaaatcatggacgaatttaggtcccgtagatatcgaaaaagcgcttcaggaatcatcaaacgtgttcatgttcaaaacggcgattgctgtcggtaaaggggagtacaaaaaaggccagtccctgccgcttgatatgaaggcattcgatactttcagatactacttcaatcagttcggactcggagttaagacggggattgatctcccgaatgaagcgaccgggtaccaagggtcacagcgaatttccggtcttctgttagactttgccatcggacagtatgatacgtttacaccgctgcaaatggcgcagtatgtatctacaatcgccaatggaggctatcgtttgaagcctcagcttgtaaaagaggtcaggcagcctgattcgaaaaaaggaatcggagccgttgtagagtctgttcagccccaagtactgaacaagattgatatgaataatgcagatattaaagaagtgcaggcaggtttcagacgcgtcatgacaaaagggacagccgcaactgattttgcgactgcgacatacagtcctgccggtaaaacgggtaccgcgcaatctttctatgacggtcctgacaaatcagagacgggtgaagcaacatataacacgactcttgtcgcttatgcacctgctgataatccggaagtggctatttctgtagtcgttccttgggcctatattaattacagcgatcgatattcgattacggatgatataggaagagcagctctggacaaatactttgagctgaaaaagaaacaagaagataataatacgaagcagaaaaacgaagataaaattcaggaagacgctgaaaacggcaatacaaacaactaatagaaaaacgctcacaacttgtgagcgttttttttatacaaaaaaacatccggatttacaaaaccttaacacttgatttatacgcattttacaagaaccctttactctagacctgtaggacaaattacacattaaatgcagggggaattcaggaaatgaaaaaaaacaaatggatgcttatgcttctgatggctgctgttatgattgttgctgcagcatgcggaaatgcaaaggaaagcggcaagacagacagtcaatctgcaagtgaggataaaaaagcatcaggttctttaaccatttctggttcatcagccatgcagccgttagtactggcagcggcggaaaagtttatggaaaaacatccggatgctgatgtgcaggtgcaagcgggaggttcaggaacaggtctttcgcaagtgtctgaaggggcagtgcaaatcggcaactcagatgtctttgctgaagaaaaagaaggcattgatgcaaaagccctaaaagaccaccgagtagcggtagtggcgatggcggctgcggtcaaccccggtgcgggcgtaaaggatataaccaaaaaacagctgacagacgtctttacaggaaaaattaaaaactggaaagagcttggcggtaaagatcaaaaaattacactcgtgaaccgtcctgattcatcaggaacacgcgctacgttcgtcaaatacgcgcttgacggagcagatcctgctgagggcattacagaggattcctccaatacagtcaaaaaaatcattgcggaaacgccgggagctatcggttatctggcattctcttatataaacgatgacaaagtaacgcctttatcgatcggaggcatcaaaccggaagagaaaaacgtcgtcacaggcgagtatccgatttgggcttacgagcactcttatacaaaaggtgaagcgtcaggccttacaaaaacgtttcttgactatatgaacagcgatgaagtacagaaaagtatcgtaaaagatcagggctacattccgatctctgatatgaaagtcacacgtgacgcaaacggcaagcaaagctgaggggagggcgggctccccgcctcttcttccttataggagtgtaaacaaatgataaatcacagagaaaaagagtctgtaagcgaacgcttaataagctcaaaacaaaacaggcaaatggatgaagtccgcggaagggtgattgtgtctgtgtgtgccgcgattatcattgcggcatcagcggcgatcacaatttttctcggcattaaggggctgcaatctttttttgtaaatggtgtaagcccgattgagttcttaacaagtctgaattggaatccaacccaggcaaaacctgagttcggcgcgctgccttttattttcggatcatttgcggtcacggttctgtcggctctgatcgcagcgcccctcggtattgcgggtgccgtgtttatgacggaaattgcgccgacttggggaaaaaaggtgctgcagccggtaattgagctgcttgtcggcattccgtccgtcgtttatggattcataggtcttacagtattgattccgtttctcggctcatttaaatcaagcggaacgggtcacagccttttggcgggaacgatcgtactttcggtaatgattctgccgactgttacatcgatttccgctgatgcgcttgcgtcacttccgaaacatcttcgcgacggttcatacgcgcttggtgcgacgaggtggcagacaatcagaaaggtgcttatcccggcggcgtttccgacattgctgaccgctgtcgtgctcgggatggcaagagcgttcggagaagcactcgccgtacagatggttatcggaaatacaaagcttctgccggaaagcctgcttgatacggcgggaacattaacgacgattatcacgttaaacatgggccataccacatacggcagtattgaaaataatacgttatggtctatggggcttgttcttcttatcatgtcgtttctgtttatattgctcatacgctacttgtcatctaggaggaaagtgtaatgaaccggaaaataacagataaattggccaccggtgtattcgggttatgcgccgctgtaatcgcggcgattttggcaggattgtttttgtacattcttattcacggcgtctctgaaatctccttgcattttcttacgtcaaaatcgagcgccattgcctcaggcggcggaatacgggatcagctttttaactccttttacattctgtttatcaccatgctgatcacgataccgctcggtgtggggggcggcgtctttatggctgaatatgcgccccaaaataaaatcaccgattttatcagaacgtgtattgaggtgctgtcttcgcttccgtccattgtcatcgggatgttcggcatgctgatgtttgtaaacctgaccggatggggctacacgattatcggaggcgcgctcgcattaacggtctttaaccttcccgttatggtccgggtgacagaaggcgcgctcactgcagttcctaaggagctgaaagaagcttctctcgctttaggcgtatcgagatggcataccgtcaaaacggtgctgattccgagtgcgattccttcgattttaaccggagccattctcgcatcaggaagagtattcggagaagcggccgcattgttatttacagcgggactgacaacgccgcggctgaactttacggatttgaacccgttttctgaatcatctcctttcaacattttcaggccggctgagacgctggcggttcatatatggagtgtcaatacgcagggaatcatccctgacgccgaagcgattgcaaacggcggctcggcggtgctggtgatttcggtactcttgtttaacctttgtgcaagatggctcgggtctgtcatttataaaaagcttacggcaaattaatcggaaagaggcgaaaacatgattgattacatcatcagggaacaagcggaacagacaaagcgttcgccggagtcttcgattttggaagtgaagcatctatcaatttattacggtgaaaaacaagcggttaaagatgtaaacatggatattgaaaaacatgcggtgacggctctgatcggtccgtccggctgcgggaaatcaacatttttgagacagattaacagaatgaacgatgccattccttcggcaagaagcgagggagagatcctttatgaagggctgaatattttgggggaagcgattaatgtcgtgtctctcagacgggagatcggtatggtgtttcaaaaaccgaatccattcccgaaatccatttacaataacatcacacatgcgctgaagtatgcgggtgaacgcagaaaagccgttttggatgatgcagtcgaagaaagcttaacgaaggctgcgctttgggatgaagtcaaagaccggcttcattcatcggctctgtcgttatcaggcggccagcagcagcgcctttgcatcgcccgtacgcttgcgatgaaacctgccgtacttcttttagatgaacccgcttcagctctggaccctatttcaaacgccagaatcgagacgcttttgacagaactgaaaaaagattattcgattattatcgttacgcacaacatgcagcaggcgcttagggtgtctgaccgaacggctttctttttaaacggggaagtggtggaatacggacagacagaacaaatttttacgagtcctaaagcgcaaaagacagatgactacattaacggaaagttcggatagggggaaggactgtgagccttgtgaaggaagcggtgcacacacataatttatttgatattcacggcatgaacgtatggtacggagcccatcaggctttaaaagacattacgatcggttttgaggagcggaaggtaactgcgatcatcggtccgtccggctgcgggaaatccacttttattaaaacattaaatttaatgctgcaaatggccccgaatgtcaaagtgacaggcgacatgatctataacgggcgcaatctgctgaaagaaaagacggatgcggcagagttaagaaaacagatcggtatggtgtttcaaaaaggcaatccgtttccccagtcgatatttgagaatgtcgtgtacggtccgagaattcacggcgaaaaaaataaaaagaaactgcttgaaatcgccgaggaatctttaaaggcagctgcgctctgggatgaagtgaaagatcgccttcaccagcaggcgctttcactgtcaggcggtcagcagcagcggctgtgcatcgcaagggcgctcgccacaaaaccggacgtccttctgatggatgaaccgacgtctgctcttgatcccgtgtccacgcggaaaatagaagagctgattttgacattgaaagaaaagtatacaattgtcattgtgacgcacaacatgcagcaggctgcgagggtctctgatcaaaccgcgtttttctatatgggcgaactggtagagtggggggatacgggcaaaatattttctcagccggatcatcaaaaaacacatgattatatcaccggaaaattcggatgaaaaaaacgggcccggccattgaccgggtccgttttatactgtctattaaaaaagcctgccggccgtatccatctgaatggacgatgcctgcaagcttttttagcgggttaatgttttgacgatttttttaaagctcatatctgagtcgactttgaaatggccggcgcggatttctttatggtagcctgcgtcaatgacgtaatcattaaagtccttcgctgaaggaataatcccttctttttcaagaatggatgacacatcagcagtgctcattccgtctttaatcgtcagtttgtatgttacttttttctttttggcgtctgtgttttggtcgttgtttaacgatttttctttagaatcaagcagtttttgatagtcatcccggttgacggagactttttgctgatcgtcgaggtagctgtttacttctttttctgtcaatgctgttttttcggttttaacggcggctgcctggtcatggtcagtcaagtagaagacagcggcgaggacggccgtcgctaaaatcatgcctgctgcaaaagcctgaatgccccgttttgtcatacgagcaccttctcattatctttaataatggtattgacgtcctcgacagacacgtgctccgcttttgcgatggcttccgcagacattccgttgttatattttgaaatgatttgtttggcgattttttggttaatgccgctgcttttggctttgcggatcacgaggttggtttccagcaattcttcttcaagcaccgtcattttctttttcagcttgtaaatttcctgcatggcggaaagctgaagcgtttcaagctcctgttctacatctttcatcggatctctttgagaatatgagaatgcaataagcgctatactgacgataaacaacgcaataatagcaatttccacgtttcatcaccttctattattaatttgcccttcttttttataccataaaacgccgccattctaaaggaaatagagaaaaaaacggaattttgtcgggaaatcttttttattcggggagcaaacggttatttctctatagatttcgcatcagaaagcccttttttgtcctgtttcgtcatattttcccttcatctgacgcaagctcattcagaggatcagaagcgtaaactgatgttttctgcacttaaacaacatttcatgtaaatcactctagcattccgtccattatagtggtattatatataagtctgaataagtaaatgatatttagtttggagggaaaataatgcgcgttaatattactttggcttgcactgaatgtggtgagcgtaactatatttctaaaaagaacaaacgcaacaatccggaccgcgttgaatttaaaaaatattgcccacgtgataaaaaatctacgttacaccgtgaaacaaaataagctgtttaaaacagcggaaaaagctggagctttcaataaagttctggcttttttgtctttcagggaggtttgagaaacgtgaaagcacaaatcagaaccgatatcaaagcaaagctttctgacatgacagaaagtgaatgggagaaaaaatgccgcagcatgcgtgaaacgctgttttctttaaaagaatggaaacaggcccgcgtgatcgccgttaccatctcgacacgcctggaaattccgacacggccgattattgaacaggcctggaaagagaaaaaacaagtctgtatcccaaaatgctttccgcagacgggagcgatggagttccgtacattttctgcgtatgatcagctggaaaccgtatatgcgggcctcagtgaaccgatcgagagcctgacggaaaaagccgcccaaaatgacattgaccttgtgattgtgccaggcgtggcttttgaccgggaaggcttcagaatcggatacggcggaggatattatgatcggtacctgtccggttataaaggccgtaccgtgtcgcttctctttgactgccagctgacagaccgcattccccgcatgccccacgatattccggtcgatatgatcgtgactgaatctgaaaccatcgcttaatcgcataaaaaacttcttgcaccggaataattctcgctgtttgacaaacgataggggcaggagggataagatgaaaaaattgttgatctactcattatgcgccgtatctgttttagccgtttaccaaaaccgctaccgtctgatgaacagcgtgctcagccagccggggatcagacggtcattcattcatttctttttaaaaataccgtttatcagaaacaaattcattcagcaggcattttaaacaaatcccgtttttcagcgggattttttgcataagaaaacctgccggtaaaaaacggcaggttttctcgtattgtcagctttttttcaggaaaccgatcagaattgagatcataggagaaatgtacaggaaaaaggtaaacggcaggtagtcgatgacggaaacccctagtgcgcttgccataaaagcgccgcttactccccagggaatcagcgggttgatcaatgttccgccgtcctcaagcgaccgcgcaaggtgaatccgcttaatgctgagcttgtcatataatggtttataagattgacccggaattaaaatcgacaaatactgctcacctgtcgcaaggtttacgcctatacttgagaagacggtcgccatgacaagacgtcctttcgtatgcacgccttttatcaatccttgaagcagcgccgcgatcaggcccgttttttccatcaggccgccgagcgcaaaggcgatcatgatcagagagactgaacccatcatcgattggagcccgcctctgttgataatgctggccacagcctggtcgccggttttaaacgccgtcccgctttgcagggcggatataaatccttgaatgctgctgtcaggaataaaaacagcagtcagaagccctgcggaaataataccggcggtaagcaccggaatcacggaaacccgtctcacagctaaaatgatcaccaacagaggtgaaagaagcgaccaaggcgtaacgtgtacggcctctttcattccggaaatgaccgcctcaatattttgcgttgaagcggcatttattgaaaccgttgaaccgagaatataaaaaagaacaatcgtgatcagcagtgccggaacggtagtgcccatcatatggcgaatatgcttaaaaatcggaatttcgccgattccggcggcaaaattcgtcgtgtcggacatcggtgacattttatcaccgaaacaagccccgcaaatgactgctcccgccgtccattcgagcggaactcccgccgcgcttgctacccctaacagcgcgacgccgattgtactgacagttgtcagacttgagccgacaagcgtgctgataatcatgcaggaaaataatgcggtcaaaagcagctgactcggctgtataattgacaaagcgtaaacggtgacggtgggaatggcgccgctgtacatccaggcgccgatcagcacaccgatcaaagccagcacgataatcggctgcacaccgtttttcaatccgctgacaattcctttttcaagactgtcccacgagaaaccgagccacaaacctgccagagacagaataatgacgcaaaagaacagcggcatatgcggctctgtatgaaagaaaaacaggcaggacataatgactgctaacatcaagacaaataaactgatggctgagatgaacgtcagccttttttcttgtttcaaaacaacaccccatcaaactttaatccttttgtgcttttgggcacgaaagtattgtaacagaaaaacgcataaatgagtgtttttttacaattatgaatatacaatttatgaaaatgacacaaggatattttctccaatcgttttttgcttgacgcccggaacagtgatgaaatacgcttatattaagaagaatagaaatggtgaagcagatgaattcattttatgacgtgcagcagctgtttaagtcattcggacatatcgtttatttcggtgacagacaagccgaaattgactttatgaaagatgaattaaaggaaatgtacttgtcaaacgtgattgaaagagaattatggcaaaaagccgccggagttcttcagagagaatcggagcggatcaaaggcagataacaaagcaggattttaataagaaaaggagattactatggaagatacatggtttgcggggattgatcttggcgggacaaccatcaagctggccttcatcaacatgtacggtgaaattcagcataaatgggaagttccgaccgataaatcaggaaacacaattacggtcacgatcgccaaagcgcttgatcagaagctggaagaactgaacaagccgaaacggatcgtaaaatggattggaatgggagcgcccggacccgtggaaatggcgacggggatggtctatgagacgacaaatatggggtggaaaaactatccgctgaaagaccatctcgaggcggaaacgggtattccggccgtcattgaaaacgatgccaatatcgcggcgctcggagaaatgtggaagggtgcaggtgacggggccaaagatgtcattttagtgacgctcggaaccggagtcggcggaggcatcatcgtcaacggagaaatcgttcacggtaaaaacggggccggcggagaaatcggtcatatttgcagtattccggaaggaggagctccgtgcaactgcggaaaatccggctgcatcgaaacgattgcgtccgcaacaggcatcgtccgcatcgcgaaagaaaagcttgcggcggtttccgactcttcgctcttacaagtggatgatctgacggcacgtgacgtgttcgaagcggctaaacagcaggataagacagcgcttgaagtcgtcgattatgtcgcaaaacatttaggcctcgtgctcggaaatctggcaagcgccatgaacccgacgaaaatcgtgctcggcggaggcgtgtctaaagcgggtgaaatcctgcggtcaaaagtggaagagactttcaaaatcaccgcgttcccgcgttctgcggaagcggccgatatttcgattgcggcacttggaaatgacgctggagtcatcggcggggcgtggattgccaaaaatgaatggctcaaacatcaaaactgctgaagaaagtctgcctgcccatatcgcgggcggctttctttttttatctcccctgtcatatagtttttaaaaaagggggatgaacatggcgggaattcgtgtcaaacctgaattgaagcagcatatgacagatattgcaaaggtgctttcaattgatgaaaaactgttgaaagccgctgataaaacggcgggaagcgatgaattattttgtcccggctttgccgtgagcgggcagtcagagggtccgccgcttgagacgctgagcgggctttcgcgatacatccggcactgtgaaaggattctttccgctgatcaatgggtgaaggaagaaaaggtgtacggctccgaatcggtttatgaagaaattgagaaaataacggatgtctttccgtttgtcacgtgccgtaaaatcggcagttccgtattgggaaagccgctttatgagctgaaaataggtgcggatacggctgaaagaaaagtccatgtaaacgcctcatttcatgccaatgaatggatcaccacctcggtcgcgcttaaatggtataaagaatattgcgcggcattatgcgaaaataaaaccgttttcaggcactctgcgcttgatatattcagccggacatcattgtcattcgttccgctcgtaaatcccgacggtgttgatctcgtactttacggatgtggagatttatcagaaaaaaatgaatttcttaatcaattaaatgagcaccgcccggatttccgcgaatggaaggcgaatataaacggtgtggatttaaataaacatttcccatccaattgggatattgaacagaggcgcaaaccgaaagccccttcataccgtgattttccggggacggcgccgctcactgaaccggaggcgcaggcgatgcaccggctgataacggaacagccgcctgaccggctgatcgcgcttcatacgcagggagaagagatttattggggatacgaaggatgtgaaccggagcaatcatcccggatgattcgggagtttgaagcgataagcggaaaccgctatcaaggcgttaaaaccattgacagccatgccggttttagggattggtttatacagcagtatggaaaagagggctataccattgagctcgggaagggaaaaaaccctttgccttttcatcagtttgctgatatttatcaagcgacggaaggtattttgtggaggtcgcttgttttttgagacatctgtgaaatttctcatttgtttacataaacaaatatgggacaatagaaaagaatggagggaaggctggtgagatacttggtttgtgttctgctgtccgcattcgttctgtgtttagcggcctgtgaaccatctcatcagcagcaagacacaggcgtttcggaaaaatcggcagaacagaaaatcgttccgctcagtaaaaaggaagcggagaaaacggaaggatggctggataacagaacgatcctgtatacagcacatcatcagctgatgaaatatgatcttttcagcggaaaatccgaacggctctatgaaacaaagggcaatattgtcaatgtaaagatcagccggaaaaaacagctgattctcgtacaggtgacaagcaaaggtcagactgagcttgtgcttatgaacaagcaggggaaaagactttatcacaaagcctttaactcttatgagctggagacggcctggaatccgtatgacccgtatcaagtgatgattaccgtttttactgaaacatgggacttcacagcctatacggccgatatgaacaacggcattttaaaaaagagtcccgttcaggccccttttgtccattggacctccactgatgaattccaatatatcaagcaaggaaaaacggaggaagagggtcctttatattcttatgacttgcagacaaaaaaagaaaaaagagtgcttcatcacgtcatctgggctgattcccgcccgggcatggcgattgccgtcagacaaacggatcaatcggacggagacggcgagttccttttccaaaagccggcatccgtgacacaccgctttcctctccaagaaaagtatgacagctttgcgccgatggaatatgattacgatcagacacacaagcggttttacatattcaagcctgaaggccgctcttacaatctgatcagctttgacttaggagacgaacgggagcggacggtgctcaaaaacacggaaatggagccgattcagatctctccgaacggggaatacgctttatacggctttacgtatgaccgtctgatttcactaaaaacaggcatgacagaaccaatcataacaaatgaaaaaggagtttgaaccaaatggcaattgcagatgtgacaatcattccgatcggaacaaaaacaccgagcgtcagtgagtatgtagcggatgtgcaaaacattttggagggttacaaagctgccggcaaaatcaaatttcagctcacgccgatgagcacgttgattgaaggtgagctgagcgacttattcgcagtcattcaggacattcacgaagccccgttccaaaaagggctgcacagagtggcgacaaatatccgcattgatgacagacgtgataaagaaacgacgctggagagcaaaatcaaaagtgtcagcaaacatttgcagcaataaaaaataagcctgtatccattggatacaggcttttaatgtgcagtcggatagccgctggttacaacggtcattacggtaaaccagccaaacacgcccagcgtggcggcggctaacaaaaatcccaggatatttctctgtctgacagcccgcaggactcctaatacagctaataatgcgacaaggccgaagattacaacaagtaacatcatgctcctcctttgtcattggaacctgaaaatctttccatttcattttaaccgttttcattttgtttgtcgatagcgttttcccggacgcattcattgaatcttccgcagaaaaccttcataataagggcatatacataaagaggtgatgaaagtgaaatggagacgaatgccggccggtccgattcaggcaaacgcgtattttcttgtcagtgaggatcagtcctgtcttatttttgatccgggcggggaagcggacaaaatcaacaattacataaaagaaaacaatctgaagccgctggccatcttactgacgcacgctcattttgaccatatcggcgcgcttgatgaagtaagagacagatgggatgttcccgtatatcttcacaaaaatgaagaaaagtggctggaggactcttccttaaacggatcaggcatattgcggggcatcgccgtaacggcacggcccgccgaacggctgattgaaggcgacggcatattggatatcggacctttccatttggagacattgtttacgccgggacattcaccgggaagcgtttcttattatgtgaaggacgctgatctggtgatttcaggtgatgtgctttttcagggaggcatcggccgaactgatttacacggcggaagtcaggacgtattgcttgattccattcatcaaaaactgctcacgcttccgggacatacacttgtattaagcgggcacgggccggaaacggatatccagacagagcaggagcgaaacccgtttatcaatggtttttcactgtaaatgaaaaaagacagaccataatggtctgtctttttctgtcagtgggttccgccgcccggtgtcataataaaaatagagtaatatgtaaatccggcgaaaaatacggttaagtaagctccgaaaatataaatatacatccgctcagtcagattcaaataagaaagaaatacgaaaaagatcgtctgtccaaaaaacaaaagagaagcgtctttcatgtcccctaaaaaaaacatgactgcaaatatccctgtccaaaatcctaacacccggaacatgcgattcattccttatcccctcccgagagtctatctgaagtttattataatagatcggcactcaaaatgtaaacattttcatgattatatttattgtggaatttatgtctttccctgtgttttatatcttatgccgctctctgaaaaagatccgaaaaatctttttgaaatatgtttaatgaaaaaaagttcagggtacttatgttaacaaagagacggattatccgagggaggaatttttaaaaatgaaagaacttattttttattcatacccgagctgcacatcatgccgaaaaacgaaacattggttaaaagcccacaatgttgactttcaagagcgccatctattcagggagacaccgacaattgatgaattgaagcagatcctatcattaacgaccgaaggaattgatgaaatattggcgacgagaagccaaacatttaaaaacctcaacctgaacattgaagaaatgactgtaaatgaagtgctgaagcttttgactgagaagccgaaactgctgcggcgtccgattctgatcgatcgcaataagctcgttatcggatacaatccaggagaactgatgaagctgacgaagaaaaaaacggtacatcaatctgtatcataagagaaaaacgaagatccgctgatcaaatttatcagctaatcttcgttttttgcggttgcgggactgggctagctggattcgaaccaacgatcacggagtcaaagtccattgccttaccgcttggctatagcccatcggatgtaattacagtatgtgcgtcaggcgccgatttatacatacaaaggaatttgaatggaggagacctgtgaaacatttgaatgaaacattatctcgaaccttaattgaagaatcaggtgaaatcacacgccagtggctgctcataccaaaatcggggcggccttcagatgatcagaaagcggaaatgcagcaccgtctgttaattgaaatcgttgccggcattctatcggaaaaagacggcggggaagaggagctgacaaaatgggcgcttcagttcgcaagggaccgggccgtccatgaagtaccggtctatgaaagcgtcacgagctttaaagaattccggagattgatctggaaccgcatacagacatgctgtgaaacgatgtctgagaagcctggggcgaatgcggtattccattggggagagaagctgaacaaagcaattgaccatatgattgaagtatttacagaggaatattataaagtgacggttacacaattaaacgcccaaaaagaaatgattaacgaactaagcgcgccgattatgccgattgccgacggtattggaattttgccgctcgtcggcgaaattgacacctaccgggcaaaaatgattttggaatcggtgcttgatcaatgttcttcactccgtctttcttatttatttttagatatatcaggtgtgccgattgtggatacgatggtcgcttatcagatttttaaagtgattgacagcacaaaacttattggcatagaaacgacaatctcaggcatcaggccggaaatcgcgcagaccgtcgtgaagctcggcatcgatttttctcaggtgaaaacggagcagagtctggcgaaagcactggcaaaaaacggatttatcgtaaaagaatcattaagatgataaaaagctgaatggccgggagggatttctccctcagctattcagctttgtcagcttcaatcgtaatgatatgatggctgtcgatttcttttaccgtaaatgtgtagccttcaaaatcaatggtgctcccgggcttcgcgtcaatatgctgagtaagaaaccagcccccgagtgtatcgacttgatcagtcgtaatctctgttccgagtacatcattggcgtcactgatcagcaatttggcgttcaggagatagcggttcttcccaagcttttgaacggaaggtgtttcgtccgtatcaaattcgtcgcggatttcgccgacgatctcttcaatgatatcttccgccgttactaatcccgcggttccgccgtactcatcaatgagaatggccatatgggcgtgttcccgctgcattttaacgaataattgataaatcggaatcgtctctatcacatggattgccggctggatgtaagggctgagttcgtgttttgtaaacgccgctccttctgacaggaatctgaataaaacttcttttatattgatgatgccgactacatgatctttatctccttttactacaggataccgggtatatttatttgttttgataatgtcccggagcatatgtcccgatccgctgtctaacggcaggctcaccatttcattccggggcaccataatttctttggcagtgcgcttatcaaatgtaaaaatgttatttacgtaatggagctcgctttttttgatcatgccgcttcgatagctttcggcaaggagcacccgcaattcctcttccgtataagccatttcatgttcggaagcaggcttcaagccgaacatggctgtaatcaggcgggcggaatgattgagcagccagatgaacggaaacattaacttataaaacaaaatcatcggtctggcagacaaaagtgtaatccgctcggctttttggatagcaaaacttttcggggcgagttcgccgataacgacattcacatatgtaaccagcagaaaggcgatgatcaatgacaggacttgggcaaccgcttcgtgaactccggtctttaaaaacaacggctgaagcattgctttgactgtcggttcacccagccagccgattcccaaagcggtgacggtgatacccaattggcacgccgataaatattcatcgaggtgtgtaatgacatgcttggctgcttttgctccttttacatcttcctcaatgagctgattaatgcgggagcgccttgctttaacgattgaaaactctatggcgacaaaacacgccgttaataaaataaatagtacgatggcagatagtttgatgatatacaatgtaacgccttccgcgaaggaaggcttgcacctcccttttttcggaataataccactgtagaaagctgctcaaacatcgaacctggtttagcctgcttcatttacggtaataaaacaagaaagcgatactggaggatgacaagagatgaaggtacattcgggagcggactggctgtggtaccagctcggtccgcatgaaaaaacggaagcgaaaaaaatgatccatcacaatcactggccgcaatgcgaaaagtggtttgaacatgaaaatcatataaactttctgcgctcagatacaaatgatcagaataatgaagctgttttcggttctttaatctatcatcaaggattagatgatgaaaaaaaccataccgtatttcacttttatattacgagagaattcttttttacaattaattttgatttttcgctgctgcgcggtgtaaaagaaaagcatgccacacagcagattcaaacctgtgaaaatccgattgaaggcttttttgttctgctgggagagctgatgaattcctatctgatcgggctggatgaatttgaagtcaagcagcggacgctgaaatggcagattcatgatgacaacagcaaaggaatcttggaaaatgtgcataaactgcgccatgagctgttcatttggaaaggccttacactgggggctaaaaaagtggaaatggctttaaaagaagcttttctcccgaaaaatgacaggcagaaagattacctcagagctcatcaaaagatggaaagaggaattacatatatcaatgagtttgatcaggaattgagcaatctgctgcacgccgaggaagtcattacctcccaaagaggaaatgaaattgtgaaagccttgacgatctttacaactctctttacaccgatgacggcgcttggagctctctgggggatgaactttgataacatgccggagcttcattggaaatatgcgtatatttgttccatcgtgctcattattgtatcaaccctgctgatttatatttatctgcggcagaaaggctggacaggggacattttgagggagcatcaaaaaaaatatttgcggaaagaaaagaaacgctaagaagagcaggcaaacgcctgctttttttgatggctggctgaaaatggccgaatggttcccgatttcattcggtaaatcaaagtcagggggcttattttttatttttttacgttttacacactgtaaaacgcataatctctcctttgccggcttttgtgtatctgatttacaatacgtgcggaaggagggaagtcttgtgaaaaatattgaaacatacagcaggaacatcataaacgaggcctatacggcaagggcttcagatatacacattgtgccgagagaaaaggatgctttcattcattttcgcatcggccatgctcttgtgaaaaaaagagtcttaaaaaaagaggaatgcgtaaggcttatttctcattttaagtttttatcggccatggatataggagaaagacgtaagccgcaaaacgggtcattgtctctgccgcttccgacggaaaccgttcatttgagaatgtcaaccttgccgacaatgaatgatgaaagtcttgtcatcaggcttttgcctaagcggcagattccccctctggataaattgtccttatttcggggggcgggcgccgcattattgtcctttctgaagcattcgcacggcctgcttctgtttaccggtcccaccggatctggaaaaacgaccactctttactcgcttgtcaactatgcaaaaaggcatttcaaccggcgtattgtcacgcttgaagaccccgtagaaacaagagatgaggatgtgttgcaagttcaggtgaatgaaaaagccggagtcacatattccgcaggtttaaaagcgattttaagacatgatcccgatatgatcatcttaggggaaatcagggatgccgagacggctgaaatcgcagtccgcgcggccatgacgggacacctcgttctttcaagcctgcatacaagagatgctaagggggccatatacaggctgctggagttcggcgtgaacatgacagaaattgaacaaaccgtcattgccattgccgctcagcgtctggtcgatttaacatgtccgttctgcaaagaggaaaactgttccgtttactgccggatgtacaggcagacacgccgtgcgggcatttatgaattgctctacgggaaaaacctcacccaatgctttcaggaagcaaagggagagcacgccaattttcaatatcagacgctccgcaggctgatcagaaaaggaatcgcgctcggctatgtcacgaccgacaattacgatcggtgggtgtatcatgaagcggattaaacgaacttggccgttgaaggatcaagcggcttttttgaaaaggctcggtgaaatgacggaaaaaggatacagtctgattgaagggctcagactgctgaaactccagctgcataaacgtcagcttgcagagctgacggacggaatccgccggctgagggaaggtgatgcgttttaccaagtgcttgaggcactgtcttttcataaagaagccgtctctatctgctatttcgctgagaaacacggggaattgccgggggcgatgaaacaaagcggcgacttgttacagagaaagctcatgcagacgaatcaaatcaaaaaaatgctccggtatccgatgtttttaatatcttccgtctgtgtcatgttttatatcctgcaaagtttaattattccgcagttttctgggatttatcaatcaatgaatatgaatacatccggtgcgactgctttcatctttgcgttttttcggcattttcatgaagcctgcgcactggcgctgtccgccgctttctgcttgtttttgtacgtttggttcttatgtaagaaaaaatccccgcaagataaaatgctgattgttgtgaaaatacccctcttaggaaaagcggccgttctttttaacagctactttttctctttacagctcagcagtcttctgaaatccggcctttctatctatgacagcttaacagcttttaaagaacaatcttttctgcctttttatcgtgaagaagcagagatgctcattacacgtctgaaagccggagaaaccatagaatccgctctttccgggcatccgtgttatgaaaaagaccttgcggctgcagtcagccacggacaggcaaacggccagcttcaccgcgaactttatacgtacagccagtttatgatggagcgtcttgaacaaaacgcggcgaagtataccggcattctccagcctgtcatttacggtgttgtggccggtatgattttaattgtctacatgtcaatgctgatgccgatgtaccagatgatgaaccaaatgtaagggagtgcttcgtctgaaaaatcaagatggatttactttaattgaaatgctgatcgttttatttatcgtttccatcctgcttttaattaccattcctaacgttacaaaacataatcaaagcattcagcataaaggctgtgaaggactgcagaatatggtgaaagcccaagtgacggcgtacgaaatcgatcatgaaggtaaaatgccggatatgaacgatttacaatcagaggggtatatcaaaaagaatacagcctgcccgaatggtaaacagatcttaattagtggcggagaagttactgttgaacaataacaggcggacagaaaatgggtttacccttcttgaaagcctgattgtgttaagcctggcgtccgtcctgctgacggttttgttcacgacggttccgccggtctgcacccaccttgccgtgcggcaaaaaacagaacagctccaaaaagatattcagcttgctcaggaaacggctatcgcagaacataaaagaacaaaaatcacttttcttccaaaagagcataaatacaaactgcagtcagacggaaggattgtcgagcgttcttttgattcgcttcatattacacttgtgactttaccggagagccttgaatttaacgaaaaaggccatccgaattcgggaggaaagattcaattgaagagcgccgggttcacctatgagataacagtttacttagggagcggaaatgtccatgctaaacggaaataaggggttctctactattgaaacactatcagcaatggccatttggctgttccttatgacgtctatcattccggtctggacggacatgctgacagatggtctgaaaatagaagatcgccaggaagcgtaccagcttcttcagaaacatatcagcacttatatgatgaccggaaaaaagccgccgtctcccgatgtgaagtggaaggaggatggtgagtattacaaagtgtgtgcggctgaccgcggtgaaaaagaaatgtgcctcagtattctcaaaacagactggctttacgcttcttaatgttttgttctccttagcagtctgtcttttcctatcaggaaccctgggcccgattttacatctgtttttatcaaaccgggccgataacggcggattagacagccgggagcatcaaattgccgttcagcagatcatgaacgaatgtaaacaggccgagactgtgaagccggcggacggcggacgggcgttagcatgccggaaaacaggaggcgaagaagtgcgttttgaaatttatcataagatgataaggaaaagagtaaacggaaaaggccacgtgccgatcctgcaaaacgcatcattaacggctgatgtgaaaaacggcctgatcttattagagatctcaagcgttgcaggtaaaaagaatcaggcggtcattccggtttacagctctttgaaaggtgattaaatgtacaaatctgacggttttatatatcccgcggttctgtttgtttctgccgcagttttacttgtcatcagctatacttcatctgatttcatcacccgaaaaacatttgcaaaagaggcaggggagtactggatcggagagaacctgctccaaaacggcgcgctgctgtcaagccgccatatggcacagggaaaaaaggcccgaactggtacacagcgttttccgtatggcaccgtttcttttcacatcaccgggagtgatcgccgcgaaacggttcaggttacaattcagacggaaaccacgacaggtacgagacgggaggctcaccttttgttcgatcagaagaagaaacagctgattcaatggacggaagtataaaaaagaggcggcgggacaacacttcatagtaaagacagcactatgaggtgagagccgtgaaaacaaatgattatgtaaaatatatgactgagcaattcgttaaatatttcgatacgccgaaacaggaacggagagagcgaaaagaagtgcggaaagaaaagaaagtgccggcttctcagcactggttcggaatattgccgtacagttttaagctgtggatgcagcggaaaaaataaagttgaatcacacgaaaggtcctcctgatacaggagggccttattggtattcctcaatgacggcaattttatttaccttttggctgtagggattaaaagaaatcgtaacaaacacgccaaattcttttgcgccatcccgcaatgtcaagtggtattgcttgactgcttcgtccgttcttttccgatcccacaccttttgaataaataacgtttgggcgagcggatatctttttttagcttctttttctgctaacttttcccattttgattgatggtgaacagcataataaggcaccgtttccgcctgagctgttcccgaaaccccgaaaacaagaagagaaaggcaaatcagactttgtttgatcatcattcttcgtcctttcgctgtatatactttccattttgttctaagcacctcgttattttctcacgttttattagaaaaaattccaaaaaggtgtgtaatttgaagcaaaacgatgtttttgaaagataccattcttaaaaacgaacaatttgaccgattttgacatttttcaagacgataatccttgattatactttgttcatacagttctttaaagagaacggttgtcatatttattaacagttttacagggggtaaggcatgttccgattgttgcgaatggaaaaaaagggcaaggtgagatggcggatgatgctatttttacggctttcgttcattttttgcctgtctgtgacgatatgtgctcagttcacaggtgatacaagttcctccttcaatgatgtgaaaagcttcagtctcccggttcaaacgtgcggagattttcaatatacggatgacgattgccgttatgacgaacgctgggatcaaagtgatttacatataacaaatcaaactgatacgtcaggcaccgtgtgtgcgccgcttcaactctatgccgagctggagaataagggaaaagagcggactgtttctgactggaaatgggagctccataaaatcgcttctcagcagcagcctttacgaaacggcaatgttgtggataaagggcttattactgataaaaaaagcaaaacgatttataaaattgagtcaaagcggtctttgaagccgggcatatacgcattcaaggtttacaagcctgaagggtatccggcggacgaagaaaaatttgagtggtcaaaaccaatgaaactcgtcaaatgccgggaacaggcgaccgtttccgatctaaagaaaacggagaaagagccggcagagccggtaaaagaaagcggggaagaacatgaaaaaaacgctgaaactgatcagtaatattttgtatgccgtcatcttcagcttgattattgtgctgacgttaacagtgatttcgacccgggcttccgggggtgagccggccatcttcggctacacgctgaaatccgtgctgtcgggttcaatggacccggaatttaagacgggttcgctcatagcggtaaagaaaatttctgacgtgaatgacttagaaaaaggggatgtgatcacctttacgcaaaatgacggaacagccgtcacacacagaataatcgggatcacaaaaaaggacgggaacctgctgtttgagacaaaaggggatcataatgccgccccggatgccgcacccgttcaagctgaaaaagtggcggcccagtatacgggatatcagctcccgtatgccggatatgtcatccatttggccagccagccgatcggaacggcgattctgttaatcgttcccggcgtcatgcttttgatttactccataacagtcattgtcagcgccctccgcgatattgagcggaaaacgaaagcgctggaagaacatgcgaaaaagggaaccatctctacatgaatacggttgcaacctggcgacaggatttgataacaaaactaaaaagtaaggggagagtacaaacatgggtatgaaaaagaaattaagcttgggcgttgcctcagccgcactcggtttagcattagtaggaggaggcacatgggccgcatttaatgatgtgaagtcgacagacgctacatttgcctcaggaacacttgatttatcggctaaagaacaatcagccaatgtcaatttgtcaaacttaaaaccaggcgataaattgacgaaagatttcgaattcagaaacaacggttcacttgccattaaagaagtgctgatggctttgaattttactgactttaaaggagcaaagaaaggaaatgaatctgcggaggatttcctcagccagtttgaaattacggttctgacagtcggtaaagaagggggcaacggctatcctaaaaatatcattttgaaggcggccagcctgaaagacttatacttaatgtcaacaaaacaggataaagcagctgccgaagcgatcagcaagcacattgatccgaaattcttgagtgagagcggaaaagtcaatgtagcaaccattaacggcaaaacagctcctgagtacgacggagttccgaaaacgcctgctgattatgatcaggtgagaatggaaatcaaatttaaaaatgacaccgctaaaactgcggacggattaagtgtgcaaaacaagttccaaggcaatgcgatttctcttcaattctcttttgaagcaacgcaatggaacggcttgaccattacgaaagatcatacggataaagacggttacgtcaaggaaaatgaaaaggctcacagtgaggataaaaactaatccgaaagtcggacagttaaaagaggagttgtgcacatatggcggcactactcctctttttgcgcttttctccatttttgataatctaaaaattcacgaaattgtttttttgataccccggatgtcattgcatcgcgaactaatttctcccattcactatctaattgaccatcgtattcggtttcatgtttttcatcaagtaaagtatgaaccgagacgtccagaacagcggagactttttcgagaaattgaatggaggggttcgtctgtaaatttcgttctattgagcttaaataagacttcgctaccccagctttttcagctagttctgatagtgagtagcctttttcttttcggtattgtttaatacgctggccaatcaatgtcatcaccttccttgtgatattatagcacattcagaaaggatttacggtatgacttctggctgcctggatatgttgagaagactttttatgcgaaagcaggtatttgcgtatttcttctaggctgatatttgctttttgggcttctaatatcagctcaacccattccttatctaattgcgaaaattccatttttgcatttttcatgcattttctcctcctaaaatacttgtttatgtatttcagccaatccgcccatgaccttatctttacatgtctggaagtgattcatcgcatgcgaaacgccagaaattttttctatatacttttattataatatagaatttccagaaaaaacgggaaaggtgtcgaatggataacgcttatccagaaaaattactttgcaggaaaaataaaccgccgttttcgatctgaatgtgaattttcggctgatataaggctttcagcgcttgtttttccaaatggtattcctcaggtttttcctctgtctgctcataaaactgatcgagcagcctgaggtcctttttccatctggcgatcgcgctgtcagcccaggctgacggctctttggcggcagcgtcttttaagtaatgctccatccttttaatcccgctttccggcttaatcatcggcgatatggtaaagcaatagtctgatatttgcgaggtcagcggaagcggtgcaagcttctgctgaaacccttctataatggttccagaaacaagatgcaggcctaaagacaaaagtctgtcttttttcatgtcggattggtatgaaatcactacatttaatccaagccagggctgaagcggaactcttgctccggctgatacaattttctcatatattcttgtaaatctcccattttgtttaactgcttgaaagatttgaaagaggcgcggggctccaaagtaaataaattcgccgtccatatcctccggagccgtttctttatcagtgatgaaagtaatcttcatcgggttcggttcgccgcccgttttttcacgccaatgccaataaaacgggcggttcataatttgtttgtccatctcgaccgtcaactgaaccgtcataaaacccggcccgtgttctgtaatcggacagtggttcgcttcaaaaaatcgcagtaaaaattcgtgaacctcctgctgtctcatgtcgcgcttcctccttttagattaagatcctttttttctggcgggcttttccgtaccgtacgacagaaaagaggtgagattgtccattttgattctcatttcttcctctgtcagcgaatggcataaaatatcatgcaaatggtcttcgaaattgctcactttgatttttgttaagatgtcatctaattctccgacgacattttcaaataaatgaattttgtcatacagaagttttaagatatgctcttccaccgtatgttttgtcgccatattgtagatatagacatctctttcctgaccgagtctgtgaatccttccgattctttgttcaagccgcatcgggttccacgggaggtcataattgataatatggttgcagaattgcaggttgatcccttcgcctccggcttctgtagcgatcagcacctgcactttgccgcggaagaggtccttcatccagtctttttttccgcgtttaaatccgcctctgaacggaacggagcttatgccgttctgctgaaggaaccattgcaggtaaatctgtgtcgccctgtattcagtgaaaataatgactttatcattaatcttttggatcaagtcaacaacttgaatcgcttttgagttttgcgtgacttgattaatgcggtccattaaattagcgatcgtctgatcatcgaatacgggcgcttgtttgtctttttggtcaagcatttttttgagcgtcatatacacggcttccctgcttgaacagcactctctttgcagcgtcataatggaaaatgcgcttgcgggcttttccgtgccgtttttcagtgcgacgatgtcatcgtaaagcgcctgttccgtcggtgaaaaggtgatcggcactgtttccacgtggcgcttcgtccaggtaaggccggtgtcgctccgcgtgttgcggatcatcaccttattgacgagctctttcaaatgctcatgagcgtcaatcccgtccttccgattgaaggtttcttgaaatccgctttcgtttcctaaatggccgggttttaacagtgacactaaattgaagatttcttcgatccggttttgaatcggcgtcgccgtcagaagcaggcagtatttcttcacaagacttctcgcaaattcataatttttcgttttgctgtttttgagcttgtgcgcctcgtcaataatgacgagatcatacggaatagaaagcacaatgtctttgtgaggggagcgtttggccgtatcaatagaagaaacgacgatatcgcactgttcccacacatagctttttttctgttcaacagcgggtattaaaaacttctcctgaagctctttcacccactgggaaacgagtgatgccggcacaagaatcaggatttttttggccagcccgcgaatcatatattcttttaaaatcaggcccgcttccaccgtttttccgagccccacttcatcagccaaaatcgccttgccgttcattttttcaacgactttctgcgcgacctcaagctgatggggaagcggagtgaaatcgggaaggtataaaggagccctcaatccttcaaattcaggaatggcaagggtctgctggacttcggccgacagtttgtacatctcccaatttgaccagggaccgtccgttttcagccgctcagaaaactctcccggccagtttgcatcaaatatgatctctgctgtcatatgtaacaaaaccgcctttcttttaaaaaactgatttatcataatttttgttgccggacgtaagtgagggtggtaggatataagtaatgatttcactaaaagatattgctttagtatgtccataaaattggtaaatatgagcgaatgacagcaaggggagagactcggacgaaagatgggcgtccgggcgccgaaggagcaaactgcggagtgaatctctcaggcaaaagaactcttgctcgacgcaactctggagagtgtctgcgtttagaagaagcaggccaccaaaggggacgtctttatgatatgttcataaagtaaactttcaggtgccgggacagagaaaccttcatttttcatgaggtgtttctctgtccttttttatatgtttttacaatgcgccaatgactgaagggggaagatgatgctgaaacgaacaccgctttatgacgtgtataaagaatacggcggaaaaacaattgattttggaggatgggagctgccggttcaattttcttctattaaagaggagcatgaagccgtccgcacaaaagcgggcctgtttgatgtgtcccatatgggggaagtcgaagtatccggtaaagacgccctgtcttttctgcaaaaaatgatgacaaatgacgttgccgatttaaagccgggaaacgcgctctataccgccatgtgttatcctgacggcggtacggtcgatgacttgctgatctatcagaaaagcgagagctgctatctgctcgtgattaacgcgtctaatattgaaaaagacatcgcttggctgacggaacatacggaaggcgatgtcacgctgacgaatcagtctgacgggatttcactgcttgccgttcaggggccgaatgctcagtcggttcttgcgaagctgactgaatgtgatttgtcctccttaaagccgtttacatttattgataaggcggacgttgccggacgccaagtcctgctttcaagaacaggctataccggtgaagacgggtttgagttatattgccgcaatgaagatgcggttcatctatttaaggagatacttgcagcgggagagcatgaaggcctcgttccctgcggcctcggcgcccgtgatacgctgagatttgaagcgaagcttgctttatacggtcaggaattgacgaaagatattacaccgattgaagccggaatcggatttgccgtgaaacacaagaaagattccgattttttcgggaaatcagtattgcgcgaacagaaagaaaaaggagccccgcgaaagctggtcggacttgagatgattgaaaaagggattccgagacacgggtacgccgtgaaaaaagacggtgttccgatcggtgaagtcacgacaggcacgcaatctccgactttaaagaaaaatatcggccttgccctaatcaaaacggaattcagtgaagtcggaacggaagtagaagtggaaatccgtaaaaaaacggtaaaagcgaagattgtccgcacaccgttttataaacgtccaaaacagagctgaaaaaggagagtcatatgaagcatcgatatttgcccgcgacagaacaggataaaaaagaaatgctgaaagccatcggcgcagaaacaattgatgaactgtttgccgatattccggaaaatgtacggtttcaaaaagactaccaaattaaacaagcaaagtcagaaactgagctgacgagagagctgacgaagcttgcggcgaaaaataaagacgctgttacatatgcatcttttctgggggcaggagtgtacgatcactaccagccggttatcgtcgatcatgtgatatcccgatcagagttttacacggcatatacaccttaccagcctgaaatctcacaaggagagctgcaggcgatttttgaatttcaaacgatgatctgtgaattaacgggaatggatatcgcaaactcctctatgtacgacgggggaacggcgctggcggaagcggcgatgcttgcgtcaggccatacgaaaaagaaaaaaatcgtcatttccgcagccgttcatccggaatcacgggatgttttgaaaacatacgcaaagggccaatatattgaggttgtagaggtgcctgcgaaaaacggcgccacagatcttgaagcattggaacatgccgtttgtgatgaaacggccgccgtgatcgtccagtatccgaacttcttcggacaaatcgagccgttaaaggacattgagccgctcgcacataaaggaaacagccagctgattgtttcttcaaacccgctcgcgctcggtattttgacaccgcccggggcatacggagctgatatcgtcgtcggggacgcgcagcctttcggcatacctgcggcgttcggcggcccgcactgcggctattttgcagtaacgaaaaaactgatgagaaaggtgccgggccggcttgtcggccaaacggaggatgaaaacgggcgaagaggttttgttctcactcttcaggcgcgcgagcagcatatcagaagagacaaagccacgtctaacatttgttcaaatcaggcgctgaatgctttagcggcttcagtcgcgatgacggcgctcggaaaaaacggcgtcaaagacatggcccgccaaaatatattgaaagctgattacgcgagacgccaagcggaaaaagccggcttacacgtagcatttgatggcccgatatttaatgaatttgccgtcaggctgaatcttcccgtcaaggaagcaaaccggcggctcctgcaagacggcatcatcggcggatatgacttaggccttgcgtatccggaactgaatcagcatatgctcattgccgtcacagagctgagaacaaaagaagagatcgattcgcttattgcgggattgggggatcaacatgaataatcaagatcaggcgcttatttttgaaatgtcccgcgaagggcgtgtcggttacagccttccggagcttgatgtgccggaaacagagcttgaaagccttcttcccggtgactatatccgcgatgaagacgcaaagctgccggaagtatcagagctcgatattatgcggcattataccgctctttctaggagaaaccacggagttgattcaggcttttatccgctcggctcctgtacgatgaaatacaatccgaaattaaatgaaaaaattgcccggttcgcaggtttttccgctattcatccgcttcaggacgaggatactgttcagggggcgcttgagcttttatacgatttaagcggacacttggaggagattacgggcatggacgaggtaacgctgcagcctgcggcgggcgctcacggcgaatggaccggcctgatgatgatccgcgcctatcacgaagcgcggggagacttcggacggacaaaggtgattgtccctgattcagcccacggtacgaatccggcatccgccacggtcgccggttttgaaacgattaccgtcaagtcaaatgagcacggactggttgacattgaagatttgaaaagagcggtaaacgaagaaacagcggcgctgatgctgacgaatccgaacaccctcggattatttgaggaaaacattacggaaatggctgaaatcgtccatcaggccggcggaaagctttattatgacggagcgaatttaaatgccgttttaagtaaagcaagaccgggagatatgggatttgacgtcgttcaccttaatctgcataaaacatttaccgggccgcacggcgggggaggacctggctcagggccggtcggagtgaaaaaagaattcattccgtatctgccgaaacccgttctcacgaaaaaagagggccgtttgacttttgactatgaccggccgcagtcgatcgggcgcgtaaaaccttattacggcaacttcggcattaatgtcagagcctacacgtatatccgttccatggggcctgacggcttaaaagccgtgaccgaacacgcggttttaaatgcaaattatatgatgagaagactcgcgccttattatgatctcccgtatgaccgtcattgcaagcatgaatttgtgttatcgggaagaaggcagaaaaagcttggcgtacgaacgcttgatattgccaaacggcttttggatttcggctatcatccgccgactgtgtattttcctctcaatgttgaagaaagcatcatgatcgaaccgacggaaacggaatcaaaggaaacgcttgatgcgtttatagatgccatgattcaaattgcgcgggaagcggaggaatcgcctgaaatcgttcaggaggcgccgcatacaacagttgtcaaaagaatggatgaaaccaaggcggcaagaaagccggttttaaagtacgaacatacacctcgcgtcagccgctgacacggtgtaaaaaaagagcttccgtataaaacggacagctcttttttatgattagttttttgctttaatttttccgccccattttttaaatccgcctttcaggttgtaaatgtctttacagccgtgtttgcggagcgtctgtgccgcgcgtccgctgcggacattgttttggcagtacagataaacgggtttatcaggacggatttcacttttgcgctgtttcagctgtgacagcggaatgttgcgcgcgccgagaatatggccgccttcaaattcattcggttcacggacgtcaatcagctgcgcttttctgtagcccgcgcggaattcctcttccgtaagtgttttcattaaacgctgctggtaaaaatacgacacgatcatataaacgataaacgccgcaacaataattaaagcaatcatattagacaatgcgattctactcctttagcttataaaataaaaccctgcttcctgaaaacaaggcttaccggacgttttgggacaaatactattatagtaaagcatgaagcgattgtcatccttaatgaaacgaaatatttttcattttcaatgcagtttgttaaactgattttattaaaacgataaagaagggttcagtgtatggaaaaagaaacatggcggtttattgactcagggaatgaaagcccggcatttaacatggcgctggatgaagcgcttttatattggcacagccaaaaaaaaattcctccggtgatccgtttttacggctggaatccggcaactttgtctgtcgggtattttcaaaatattaagaaggaaattaactttgacgcagtacataaacacggcctcgggtttgtcagaagaccgacaggcggacggggtgttctgcatgataaagaattgacatacagcgtaatcgtttcagaggatcacccggaaatgccggccacggtgacagaggcgtaccgggtgatttcagaaggtattctgcagggattcagaaaccttggacttgatgcctgctttgcgattccgcgaacggagaaagaaaaagaaagcttgaaaaatccgcgctcgtccgtctgctttgatgcgccttcgtggtatgaactggtcgtcgaaggacggaaagttgctggaagcgcacagacacgccaaaaaggcgtcattcttcagcacggttccatcctgcttgacattgatgaggataagctgtttgatctgtttttatatccgagcgacagagtccgtgaacgcatgcagcggaatttcaaaaacaaagcggtagccatcaacgccttagcgccgaaacgggtaacgatggatgaggccagaatcgcttttaaagccggttttgaggaagggctgaacattcatcttgagccttacacactcacgtctgaagagctttcatttgtcaatgagctggctgagacgaaatacgcgtctgatgaatggaattataagcgctgataaggcttgacagaccggaagcatccttgttttttcatgaccgttagtgtaaacttgtaatggtttataaagttaaggtgctttttgggagggttacttatgacaacaccaagtatggaagattatattgaacagatttatatgctgatagaagaaaaaggatatgcacgggtttctgatatcgcggaagctttggcagtccacccctcctctgtaacgaaaatggttcaaaaactagataaagacgagtatttgatttatgaaaaatatcgcgggctcgtattgacgtcaaaaggcaaaaagatcggcaaacggctcgtatacagacacgaattgcttgagcagtttttaagaatcattggtgttgatgaagagaagatttacaatgatgttgaaggaatcgaacatcatctgagctggaacagcattgaccgcatcggcgacctcgttcagtattttgaagatgacgaaagccggaaaaaagaattgaaatccgtacagaaaaaaaccgaaaatcccggtgaataaagggcagcccgaaatggggcgccctttttttaatgtcttcattctttggtctatttcgctcagccgtttcttaaaataataatacaccttgagatggaagggagagggcgcgctatgcagattgacggcgtattttcgggcggggggataaaaggggtggcgcttgccggcgcttatgaagcgctggaagaaaagggctttcgctttgaaaggctcgccggaacaagcgccggcgcaattattgccgcatttatcgctgcgggctatacgagcagagaggttcattccatcatagatgaggtggacggaaggcaattgcttgatcagaggtactcattcctcccgctgaaaatcctgcggtgggtgtcgatatattggcgcctcggactatacagaggcgatatgctggaaaaatggattgcggataaattaaaagcgaagggcatcatcgcgttcggcgatttgaaaaaaggctcgctccgtctcatcgcttcagatctgacgaacggaacgatgatcgtgcttcctgacgatcttccccgctacggattaaatccggagatgttcccggttgctagagccgtcagaatgagctgcagcattccttatttttttgaaccgataaaactgaagaccgaaaaaggcacctcgacggtcgttgacggcggcgtgttaagcaatttcccgatttggctgtattcaaaagaacgcaaacggccggtcatcggaatttcgctttcgcccaacgaaaaagagcgcccgaaaaaatcaatccgcaacgcttttgagctgttcggggctttgtttgaaacgatgaaagacgctcatgatgccaggcatatcgcgacaaagtacgaacagaatattatttttattccggtggagcatgtgatggcgacggagtttcatctcacaccgcaaaaaaaactagctctcattgagctaggaaaaagcagaacagagcaatttttgaagcaatggagctattaaaaaagcgctctgtttttctttttattctttttaccttctatgacggtaagctgggtctggctttttttcttaagaatcatcggcttcggtctgctgctgctcggcacgctccgcaaatggctgacccggcctctgtgtccggcgcggtgcttcgctttttgctccttcattcggagccgcgattgtctggccgcttttctgaaagcggttccgtcacggccggtgcggcggttcaggaccgtcctcacgataaaataaataatgatgcctgcgataataacggtgatcgctcttgaaatcatctgcccggggttggttaccgccgcataaatgaaaccgaatgcgccaagcgctatcaatacagcaaaaaaaggttgtacacgatgattcataactgcccacctccaaaataataacggtaacggttcagattacgttgtgagacggcttttcgctctgttctgaaatgtcttccagtctgagaagctcgttaaagctttctatggcaacctcgacctggtcatccgccggttcctttgtcgttaaaagctgcagccacaggccgggataaccgagcactttcaaaacggggatattccgcactctgttcgtcagctggagcacttcaaaggagatgccgagaacgaccggtataagcgcaatcctgtctaaaatccgcaaccaaagcggatctgtcggaacgagtaaatagatgaacatgccgacaatgatcgtaaataaaataaagcttgaaccgcaacgataatgaagccgtgactgtttctgaacattttctattgtaattggcaaattctgttcataacagtttatgaccttatgttcggctccatgatattgaaacactcttttaattaacggcgtcattgataaaaaataaatgtagccgagaagcagaatcagcttaaacagactttcgattccgatctgcgcggcgtctgaggaaaatacgggccttacaagctccgctaagaagaccgggacgagcgtaaaaacgaatttgctgaacaaaaacgacagaacgccgatcaccgccaagctgaaaaacatcgataagcccgaacccttcttatcttcctgctccagtttggcgtcatcttgaggatcaagcccgtaacgttcgctggaaaagtttaaatgctttgtgccgttggcgctcgcctcaatgatggcgacgattccccgcaaaaaaggaatcttttttaaagccgaaagcttggcgttcggcactctcggaagcttgaaaaaatcaatgcttccgtcattcctgcggatggcggtaacataattttttctgccgccgaacatgactccttcaacgacagcctgcccgccgtatgcagggggcgttttttgtttggacattgtttatcaacctgcctgttttcttaggatttactaaccatttcctttcactctattgtacaggaaacctcggtaaacctctagttagacagccggaaaatcaatgctttttctacatgcagtataccccgtttttttagaatttactcattgaatgaaaatatggcgcagctttttatgacttttcaattttggggcagtctatgactggaggtgccatgatgacaagcgaaaaacattcagaacaggaagaaaaaaagaagcaggatgatgatcagcagcctgtttcatttaccggcagaatttgcggtataggatttgccggcggtgtattttggagtttgatcggctatctcgggtatgtctttcatttttcagagatcagccccaacatgattcttcagccgtttatgatcggagaatggaaaaaacaatggctcggcacgatggtcagcatcgttgtcatcgggttgatttcaattgccggagcgttcatttatttcgtgtgcctgaagcgttttaaaaccatgtggccggggatggtgtacggcatcattttatggtgtgcggtttttttcttattcaatccgattttcgaagatgtgaaatccgtcactgaattgaaatcagatacaatcgtgacgacgctttgcctttacattctgtacggtttgtttgtcggctactcaatttccttcaactacaatgaacttacgtcagacaagcttgcaagggcgcttggcaacaagtgaataagtgtataatccctgtccggtatggtaaaatgttcacgagaagtgaacattttttatgctgaaaaccgagcggggatgctcccgcgttgtcaggcggcagtcaagaatcggcgaggaggagaaagggaatgaaacttgagaaattgcgaaatcttttcggtcagctggatatagacggaatgcttgtgacaagctccgccaatctgcagtatatgacgggatttacgggttcgtcaggccttgcggtcatatcgaaagaacgtgcggcatttatcacggatttccgttacaccgagcaggcgaagacgcaagtgaagggttttgacattatcgagcacggcggaagcttaatccaaacggctgcggatacgattcttgagtacggcattaaaaaactcggcttcgagcaaaacagcatgacgtacggaacatatgcatcctaccaagctgtgctgcaggaagcggagatggttcccgtcgcggattccgttgaaaagttgcgcttgattaagtcaagtgaagagattaagatattagaggaagctgcgaagattgcggatgatgcgtttgaacatattctgacgtttatcaaaccgggcatctcagagatttcagttgcaaacgagcttgaattttatatgagacgtcaaggagcagacggctcttcctttgatatgatcgtcgcctcgggagtcagatccagccttccccacggagtggcaagcggcaaattgattgaaaagggagacttggtcacgctcgatttcggcgcttattataaaggctattgttctgatatcacacgcaccgtcgcggtcggagagccaagtgataaactgaaagagatttatcaggtcgtatacgatgcccaagcgcttggtgtcctgcatataaaacccggcatgacgggaaaagaagcggacgccctgacgagggatcacatcaccgcaaaaggctacggacagtatttcggccattcgacaggacacgggttcggaatggaagtccatgaatcaccggggctgtctttcaggtcatcggccgttcttgagccgggcatggcggtaacggtcgagccgggcatatacataccggatgttgggggcgcaagaatcgaagatgatatcatcatcactgaggacggcaaccggacaattacgcattcccctaaagaattaattattttgtgatcggaatataggaggacatcaaacatgatttcagttaacgattttcgtacaggactaacgattgaagtagacggcggcatttggcgcgtcgttgacttccagcacgtaaagccgggaaaaggagcggcatttgtccgttctaaattgcgtaacctgcgcacgggcgctattcaggagaaaacattccgtgcaggtgaaaaagtcgcgaaagcgcaaatcgaaacaaaaacgatgcagtatctttatgccaacggcgatcagcacgtgttcatggatacaagctcatatgaacagcttgaattgaacgaaaaccaaatcgaagaagaattaaaatatcttctggaaaatatgtctgtgcacatcatgatgtatcagtctgaaacgctcggtattgaactgccgaacacagttgaactgaaagttgttgaaacagagccgggaattaaaggcgacacggcgtcaggcggcacaaaacctgccaaaacggaaacaggtcttgtcgtaaacgtaccgttcttcgtgaacgaaggcgatacgctagttgtaaatacatcagacggctcttacgtgtcaagagcgtagtcaaagaaattcggagtctgctccttttacggggcaggctttttttgcgttctgcctcagaatctttcttctatatgaaaatagtgagactacttccgtcagctagagcatatagtgtaacaaaatgcttgaagttgggggattgtaatgaaatttttgtttggttcaatcaattctactgttttaatgatggccggtttacgagttttgtcctcgctcattgaattatcggccgctattatcatgcttttgacaaacgacatcagaaaagcggttgtggtgaatagtattttggcaatcgtcggccctctgatctttatcattacgatgacgatcggcatttatcagattgccggacagctctcatatgcaaaattaatattgatttttgcgggagtggtgctgattttggccggtgtgcataaatagagggccggggtgtcataaagtctgtcccggatcatacattttaaagaagccaatcggtaaaaaaggaggagactctattgaatgaaattacagaggttctccctgaattattgagagatgccatatccgccgtgcccgaagaagcgaggcgggatacagaagaaatcagaatccgcgtcgacaggccggttgaactgatccgaaaaggacaacctttgtatttgtcatatgtgtgcacggccggcgacgcacagctgatcctcagccggctcagcaattacagtatgtacacgctggaagaagagctgaaaaaaggatacatcacaatcagaggaggccaccgtgtagggctggccggaagagtcatcgtcgaaaacggagccgtcaaaggactccgggatattacttcttttaatatccgaatcgcccgggagaagctggggatcgcagaaccgctcattcctttcttatggaaagaaaactggctgaacacgctgatcatcgggcctccgcaaacggggaaaacgaccttgcttcgtgatttggcccggctttccagcaccggatcaaaacgcattccggcgaaaaagacaggtatcgtagatgaacggtcggaaattgccggctgcctgcggggcattccccagcacagtttcggccgcagaatcgatgtccttgatgcttgtccgaaggcggaagggctgatgatgatgattcgctctatgagtcctgatgtcataattgtggatgaaatcgggagaatggaagactcacaagcgctgctggaggcgctccatgcgggcgtatccgttatcgtatctgcgcacgggtggaacatgaaagacttggtaaagaggccgtcgctgaaaatgctttgggaggaaaacgtgtttgaccggtatgttgaactgtcaaggcgccgcggtccgggaacgatcagcaggatgtacggaaaggacggggaacctgttccgcatgctgaaagcgtgatgacatgctgaagcttttgggtgccgtgtttattctgacagcgacgacttggacgggatttgagatcgccaaaatgtatattgaaaggccgaggcagatccgccagctgcgcgcggcgctccaatcgcttgaagcggaaatcatgttcgggcatacaccgctgcataccgcctcgggacaaattgccgcacagctttccaaacctgtatcgttactgtttcaagctttcagcagaaggcttgagcagggaagtgattccgccaaaacggcttgggaacagagcttgaaacataactggtcttccatggcgatgaaaaaaagcgaatatgatgtgctgaagcaattcggagagacgctcgggctccatgaccgtgtttctcagcagaaacatatcaagcttgcgcttacacatttggaagcggcggaagcggatgccggacgggcgcaggcgaaaaatgaaaaaatggtgaaaagcttaggatttttagccggactgttactcattcttctattgatgtaaacatgaggggagcaaacataaaatgggagtcgacgtaaatgtcatttttcaaatcgccggagtcggtatcgtggttgcgtttctgcacaccatacttgatcaaatgggaaaaaaagaatacgcccagtgggtgacgctgcttggctttatctatattttatttatggtggcgacgattgtcgatgacctgttcaaaaagatcaaagctgtgtttctattccaaggataggggggcttacagattgagattgttcaaattgtaggtttaggcctgatcgccacatttctctccctgatcgtaaaagaacagaaaccgactttcgcgtttatgattgtcgtcttcagcggctgcgtgatctttctttatctcatcgaccagatttacgacattatcagaatgatagaaaaaatagccgtcaatgcaaatgtcaatatggtctatgtggaaaccattttaaaaattatcggcatcgcctacatcgctgaattcggagcgcagcttacaaaggatgcgggccagggagcgattgcttcgaaaatagagctggccggaaaaattttgatactggtaatggccgtgccgatactcaccgtcattattgaaacgattctcggacttattccttcttgatcataaataaaatggaaaggggggcacaaaaaatgaagcgctttcggtgggcgggagcttttttgttcatcctcttattttttcagactgaatgtgtacaagctgccggaacagacggtgcgtcgcaggaaaccgtagttcaccaagaatccgctgatgaagtggcgaaaaagcaggccgaagcgctgaaaacagaaggcatcggaaagttttgggacgacatcatgacagaatacggcggtcttctgcctgaaagccaaaagggaagcatcatcgactttattaacggtgaaaaaacgttctcaccggaggcatggctgaaggctttattttcatacttgtttcatgaagtgctcgcaaacggaaagcttctgggaactttgattcttctcaccattttttgtgtcattctgcagctcctgcaaaatgcgttccagcagagcaccgtcagcaaagtggcttatgcaatcgtctacatggtgctgattattctcgctttaaacagctttcatgttgccgtcaattatgccagtgaagcgatccagacgatgacaagcttcattctcgcgctcatcccgcttttactcgcgcttttggcgtcttccgggggagccgtctccgcagctttttttcaccccgttattttatttctgatgaatacgagcggccttctcattcaaaacatcgtcatgccgcttatcttcctgtcagcgattttaagtatcgtcagcacgatgacggatcaatataaagtcacgcagcttgccaatctgctcagaaatatcgcgatcggcgcgcttgccgtattcctcaccgtgtttctcggcgtcatctccgtacagggggcttcggctgccgtgacggacgggattacgctcaggactgcaaaatttataacaggcaattttattcccgtgctcggccggatgtttacggatgcgacagatacggtcatcagcgcctcgctcctattaaaaaacactgtgggaatcctcggagtcggaattttgatctgcatctccgcgtttccggcgatcaaagtgctctcgctcgcttttatttataagctcgcggccgctattttgcagccgctcggaggcgggcccgtcattacgtgcctcggtgtcatcagcagaagcgtactgtatattttcgcggcgctcgccatcgtctctctcatgtttttcctcagcatcacagtcattattacagcaggcaacctcaccatgatgatgaaataaaggaggcccattggatatgagctttttaacagaatggctgacaagcattattttatttatcttattcgccatcgtcatcgacatgctgctgcccagctccagtatgcaaaaatatgcaaagatggttgtcagcctgctgttaatcattgtcatgctcaacccgatattcaaacttttcaaaacagacccggaaatcatcttcgattatttgacaaaacaagagcaatctcaatccgctgatataaaaaatcaaatcaaatcagaaaaaaaagaaatacaagcatcaaaccgcgcatatgttttagaagaaatggctgtccaactaaaaaagaaagcggaggagatgttcagtcatgacgaatacaaaatagacgacatccgccttaaagcggaagaacaggttcgttcagaagaagatgtaaaaacgatcagcgtgtatatggccccatcttctgaaaaaaccgtgcaaaccgtcgcaccgatcgacatccgcacagaccgcaaatacgaaccggaaggcgcagccgacaaaaaagaggccgcagacatcaaagaaaaacttgcggatatatgggaaatcggcagtgagaaaattacggtttatatggaaggcggggagaaaaacggccatgaataaaaacggactatggaccatactcaaaaaacagctgatgatcggacaggcgaaagacggagaaaaaccaaaactgacaaaatatcattactttctgttcgtatttgtgctcggggtatcttttatgctggtcagccagctgttctcttcaccggagaaaaccgggaaggaccaaacggcgcagaccgtcatgtccggccgaacggaagacaaaagcgggcaaaaaagcgcacccgtttttaaggcatcgaaagacggcagcgccaaaaccacgatcgatgattacgaaagagactatgaaaaccagctgaaagaaatccttgaaacaattatcggcgtggaggatgtctcaattgtcgtaaacgtagacgcaacatctttgaaagtgtttgagaaaaataaaacgaaaaaagacaccaccactgaagaaaccgataaagaaggcggcaaaagaagcgtaaccgatcaaacctctgaagaacaaattgtcatgattcgaaacggggatcaggaaaccccggtcgtcgtccagacgaaaaagcccgatatccgcggtgtactcgttgtcgctcagggagtggacaacgttcaaataaaaaaaaccatcattgatgccgtcacaagggtgcttgatgttccgagctaccgtgtagcggttgcccctaaaaaaatcaaggaggattcataaatcatgctgaaaaaacaaacggtttggcttttaacaatgctcagtctcgtcgtggtattaagtgtttattatattatgtcgccggaaagcaaaaatgccgtgcagatgaaaagcgaaaaaagcagcggagaagtcgccgctgaaaaaacgccggctcctgaaacgaaagataagagcggaagcggtacggaaaaagaagacggaacaaaaggaacgaaagattctaaaggcacaaaagaggataaagaaacatcagccgaagcatcggacaaagacggatcggtcgctacagaaacagctgatgaaaacttatttaccgcataccgtatggaacttgaagacgcaagaagcaaagaaagggaacagttaaacagcattgtttcaagcgatgatgcgaccgcaaaggaaaaaagcgaagcctacgataaaatgacggcgctgagcaatgctgaagggacggaaaaacagctggaaacgctgattaaaacacaaggctacaaagatgcgctcgtggatgctgaaggagacaaaatcaacattaccgtcatgtctgacaaacattcaaacgcaaaagcttccgctatcattgacctggtggaaaaagaaatcaagacgatgaaagacgtcgccgtcacgtttgaaccgacaaagtaagagacctgaaccgcccgcacccgctgcgggcttttctgatgtcattttagatcagtgttgaatttacacaagcgctcctgtaagataaacatagtatgtacttttagtagcaacccataaatttctattttttatacataggagtggaaactgatgttaaaaatcaacgaaattcacgaactgataaaaagaatcgatgaatcttccatcgacgaatttgtttacgaaattgaaggcgtaagcctcaaactgaaaaaaaatgaagcgccggcagtgaatgtaacgggacaagcccaagccgttcccgccgcttacgcacctgctccgcaggctgcaaaaccggaagcgcgtgaagccgctcctgctcaggaagcgccgaaacaagacgaaaacctgcacaaaattacgtctccgatggtcggaacgttttatgcttcttcatcgccggaagccggtccttacgtaaaccaaggttcaaaagtgagcgaaaatacagttgtttgtatcgtagaagcaatgaaactctttaacgagattgaagccgaagtaaaaggagaaatcgttgaagtgttagttgaaaacggccagctggtcgaatacggacaacctctatttcttgtaaaagctgagtaaggagacctgctattatgattaaaaagctattgatcgccaaccgaggagaaatcgccgtcagaatcatccgggcctgcaaagagatgggcattgaaactgtagccgtttattctgaggcagataaagacgccctgcatgtccaaatggccgatgaggctttttgtatcgggccgaaaacatcgaaagagagctatttaaatgtaacgaacatcgtcagcgtcgcaaagctgaccggcacggatgcgattcatccgggatacggatttttagctgaaaacgccgactttgccgagctgtgcgaggaattaaacgtaacgtttgtcggccctacggctgacgccatttcaaaaatgggaacaaaagatatcgcgcgcgacacgatgcagctggcgggcgtgccgattgtgcccggttcaaaaggaatcataaaaaatacagaagaagcggtttcgcttgcaggtgaaattgggtatcctgtcattataaaagccactgcgggcggaggcggtaaaggcatccgggtcgcacgcacagaagaagaactgattaaaggcattgagattacccagcaggaagccgctacggcattcggaaatccgggtgtgtacatcgagaagtacatagaagatttccgccatgttgaaattcaggtgcttgcggataattacggaaacacgatccatctcggagagcgtgactgttctatccaaagacgtctgcaaaaacttcttgaagagtcaccgtcacctgcgcttgattctgaaatcagggagcagatgggtgaagcagcggtaaaagcagcgaaggccgtcggttacacgggagccggcacagtagaattcatttatgactacagagaacagcgctactacttcatggaaatgaacacgcgtattcaagtagagcaccctgtcacagaaatggtgacgggaacggatctgatcaaagaacagatcaaagtggcatccggacaggagctttcgctcagacaggaagacgttgaatttaacggctgggcgattgaatgccgcatcaacgctgaaaatcctgcgaaaaacttcatgccttcacccggtaaaattaacatgtacctgccgccgggcggactcggtgtacgcgtggattcagccgcatatcccggctactcgatcccgccgtactatgacagtatgattgctaaagtcatcacatacggaacaacgcgtgatgaggcagtcgcacggatgaaacgcgcgctgagcgaattcgtgattgaaggtattgaaacgacgatcccgttccatttgaaactgcttgaacacgaaacatttgtcagcggagagtttaatacaaagtttttagaaacatatgatgtaatgggctcataatttttgcgggaggtgaattgaatggaagacaacagtgtgcttaaaatggatcatgatgaggctcatttaggcaaggttgaaattgctcctgaggtcattgaagtcattgccggcatcgccgcttccgaagttgaaggagttgctgaaatgcgcggcaatttcgccacgggcgtcgtagaacgcttcggcaaaatcaatcacggcaaaggcgtaaaggtcgatttagccgatgacgggattaccatcgacgtctattgcgtcgttcaattcgggatctcgatcccgaaagtggcggcaagcgttcaggagaatatccgccaaaccttattaaacatgacgtctctgaccattaatgaaatcaatattcatatcgtcggcattcaatttgacacgaaagcccaagaagtcgaaatcgacgaagaaatgtaatgagcgtataaaaaccaaggggatgggcagccctttggttttttatacgtttcccgtcatttcaggcatgaagaaagccggcttacaaacggcagccgagtttcttcatgctgtgaaatccgaatgaaattaatacagtttgtgaaaatattcggcattagggtgaaaaaacctaaatttcgacatgcgattgagaaaaaaatatgttatgatctctttaagcttaacgacaagcggataaagcggatctgaaggagaaagaaaatgaaaagaagaacagctagagaaaaagctttgcaggcactttttcagattgatgtcagcgatattgcaccgaacgatgccattgagcacgcgcttgatggtgaaaaaacagatgccttctttgaacagctggtgtacggagtgatcgaacatcaggttcagcttgatgaaatgatttccggccatctcgtcaattggaagcttgaccggattgcaaacgtagaccgcgcgatcctgcgtctggcggtgtatgaaatggtttattctgacgacattcctgctaacgtgtcattaaacgaagcgatcgagctggcaaaacggttcggcgacgataaagctgcaaaattcgtaaacggggttctttctaacattaaaactgatatcgaatcatagggggaaagaaaatgactgcaacaatcatcgacggaaaagaaacggctaaagaaaaacgcgaacaattggcaaaagaagtagaagagctgaaagcacaaggcgtagtgcctggcttggcggtcattttaatcggagacgatcccgcttctgtttcatatgtgacaggcaagaaaaaagccgctgaaacaatgggaatgaaatttaagcttgaccgctttgactcaagcttaaccgaggcggagcttttaacagtgattgatcagtataatcaaaatccggaattccacggcattctcgtccagctgccgctcccggatcatatttctgaaaaagccgtaatcgagcggatctcccctgataaggatgttgacggtttccaccctctcaacgtcgggaaaatgctgcttggcgaagatacatttcttccatgcacgccgcacggaattgtcgagttattgaaaaagacgaacgtagatctttccggcaaagaagttgttgtagtcggacgaagcaatattgtcggtaaaccggtcggccagctgctgctgaacgaaaacgcgaccgtcacatattgccattcccgcacgaaaaatatgtctgagcatacgaaaaaagcagatattcttgtggtagcggtcggtaaagcgaacttcatcaaagccgatcaaatcaaagagggcgccattgtcattgatgtcggcgtcaaccgtctcgaaaacggaaaactctgcggagacgttcagtttgatgaagcgaaagaaaaagcatctttcattacgccggtgccgggcggagtaggtccgatgaccatcacaatgcttgcgcataatactgttaaatctgccagacgtacgttatcatagataaccggagacagtcacaaaaagtgtgacaatgagcacgatacccgcttcttaaggctcctttcagccagagcgggttttcttagtttagggcaaaaagcctttatgaaaggagtgcaggatgtgagtgaagcggcatatgtcacggtttccgcgctgaccaaatacattaaacgaaaattcgatgtggaccctcatcttgaagacatttggattaagggtgagctctccaatgttaaaatccatacgagaggccacatctattttacattaaaagatgagcatgcccgcatgcaggccgtcatgtttcagaggcaaagttcgaggcttgcgtttaagcccgaagacggaatgaaggtcatcgtaagaggcggcatctccgtctatgaaccgagcggaagctatcagctgtacgcgaaagaaatgcagccggacggtgtgggggcgctctacttagcatatgaagaattaaagaaaaaacttgccggcgaagggttgtttgatgaccggcataagcaggccatccccgcttttccggccacgatcggggtcgtcacgtcaccgacgggagcagccgtcagagacgtcattaccacactcaaaagaagatacccccttgtgaaagtcattgtgcttcccgcgctcgttcaaggtgaaaatgccagcagatcgattgtgaagcgcattgaagaagccaatgcacaaaaaatgtgtgacgtcctgatcgtcggaaggggagggggttcgatcgaagaattgtgggcatttaacgaagaaatcgtggcccgggcgatttttgcttccgccattccgattatatcagccgtcggacatgaaacagattttacaatcagtgatttcgtcgcggatatccgggcggcaacgccgacaggagcggcagaaatcgccgtcccccacacgacggacttaatggaacggacaaaaacggcggaagtccgcctgacaagagcgatgcagcagcatatcagcaagaaaaaagaacgagttcaatcgctccagtcatcctacgcgttccgttttccgaaacgattgtatacccaaaaagaacagcagtttgaccttttgtatcagcagttccaatcacagctcacagggcttacggacatgaaacaaaggcagctggagcggaatacgtacagattaacggcgctccaccctgaaacccagctgaaacaggcgaaaaaacggtacgaggagcgctcaaatcagctcgcccgaagcatgaatgtccagctgaagcagcttcattcgcagtttcagacggttcttggtaaactgaatgcattaagtccccttcaggtgatggagagaggatacagtctggcctataaagacaaagagctgatcaaaagcgttgatcaagtggaacaaaatgatacgctagaagtaaagatgacagacggcgttctgacgtgtgaagtattgcaaaagagaggcgaacgaaaatgacagaaaccaaaaaaagtgaagagctgacatttgaagaggcgatgaaaggccttgaaggcattgtggcaaagcttgaagaaggagacgtgccgctggagcaggcgattaattattttcaggaagggatggccctttcaaaaatgtgccatgaaaagcttcagcatgtcgaaaagcaaatggactttattttaaaagataacggagaacttgcacctttcagcgttcaggaggaagacgaaggtgacaaataaactggacgcatttttagcatcgcgcaaacaactgattgaacaacagctttctttgtatacagaacggcttgcgatgcctgaaaccctcaaaaaatctatgctgtattctttggaagcgggcggaaagaggctgcgccccctcgtcgtcttagccgttctgaatgcttacggaaaagatgaaaaagacggaattccggtcggatgcgctgtcgaaatgattcatacgtattctttaatccatgatgatctgccttgcatggacgatgatgatctgcgccggggaaagcccacaaaccataaagtcttcggagaagcggcggccgtattggccggagacgggcttctgacagaaagctttaaattgatcacatctcatgtgtctgaggcggtttcagcagaaaaacggctccgtctcgtcgatgagctgatcagcgcggcgggaacggaaggaatggtcggcggacaggctgccgacatggaagcggaacaaaagcggataacgcttgaggagctggaatccatccacgagcggaaaacggccaagctcctcggtttttccgtgacggcgggcgccattttggcagatgcgccggaggatgaagtcgaaaagctccgtttgttcagcagccatatcggcatcggatttcaaatcagagacgacatccttgatattgaagggcatgaggagaggatcggcaaaccggtcggctcagacacctcgaacgaaaaatcaacgtatccgtcgcttttaacgcttgaaggcgcgaaaaaaaagcttgcgtatcatatcagcgaggcgaaacagatcatcagcggcctttctcttcagaaagaattgctgcatgacctctgtgatttaatcgcggcgagagatcattaaaaacggtcctgatttgaaggggctgccgctcctatggtaaaatgtaagcagtttcgatgaaaatacaaagggagtctttttcttttttcaaaaagacactgtttaatttgcagaaattcatgctgaaagtgagttgatccgctttggatcttttatcaatacaggacccgtcatttcttaaaaagatgtcaattgaacagctggaagagctgagtgaggagatccgcaatttcctcatcacatcgctgtctgcctctggcggccatatcgggccgaacctcggggttgtcgagctgacaattgcgcttcacaaagaatttgacagtccgaaagataaatttttatgggatgtcggacatcagtcctatgttcataaactgttaaccggacgcggcaaggagtttgagaccttgcgccaatataaagggctttgcggtttcccgaaacgcagcgaaagcgaacatgacgtatgggaaacaggccacagctcaacctcgctctcaggcgcgatgggaatggctgccgcccgtgatattaaaggatcgaaagaatatatcatcccgattatcggagacggcgctttaaccggaggaatggcgcttgaagcgctgaaccatatcggtgatgagaaaaaagacatgatcgtcatcctgaatgataatgagatgagcattgcgccgaatgtcggggcgattcattctatgctgggacggcttcgcacggccggcaaatatcaatgggtaaaagacgagcttgaatatttatttaagcgcatcccggccgtcggcggaaaattggctgccacagcggaacggataaaagacagcttaaaatatatgctggtgtcaggcatgttttttgaagagctgggctttacgtatttaggcccggttgacggtcattcctaccacgaactttttgaaaacctgcaatacgccaaaaaaacgaaaggccctgtccttttacatgtcattacgaaaaagggcaaaggctataaaccggctgagaccgacacaatcggcacatggcatggaacggggccgtacaaaatcaatacgggtgatttcgtcaagccgaaagccgcggcgccttcatggagcggacttgtcagcggcaccgtgcaggagctggcgcgtgaggatgacagaattgtcgcgattacaccggctatgccggtcggctctaaactggaaggatttgcgaaagaattccctgaacgcatgtttgatgtcggaatcgcagaacagcatgcggcgacgatggcggctggaatggcgctccaaggcatgaagccgtttcttgcgatttattcgacctttttgcagcgggcgtacgatcaggtcgtccatgacatctgccgtcaaaacgcgaatgtatttatcggcattgaccgcgccggtttggtcggcgctgacggggaaacgcatcaaggcgtttttgacatcgcctttttgcggcatataccgaacctcgttttaatgatgccgaaggatgaaaatgaaggccgccatatggtcaatacagccctttcctacgaggaaggtccgattgcgatgcgcttcccgcgcggaaacggactcggcgtaaagatggataaagagctgaaaaccattccgatcggaacatgggaagtgctccgtcccggaaaagacgcggtcattttaacattcggtacgaccattgaaatggcgctggaagcggctgaagaactgcaaaaagaaggcctgtccgtgcgtgtcgtgaatgcgcggttcataaaaccgattgatcaacaaatgatgaaggccattcttaatgaaggtctgccgattttaacgatagaagaagccgtgcttgaaggcggattcggcagcacgattctcgaattcgctcatgacctcggcatgtatcatacaccgattgacagaatgggcatcccagaccggtttattgagcacggcagcgtaaccgccctgcttgaagaaatcggtctcacgaaggctgaggttatgaaccggataaaactgctgatgcctccgaagacacataaaggaattggatcatgacagcaaaaaaagaacgattagatgtacttcttgtagaaaaaggccttgcggaaacgcgggaaaaagcgaaacgcgccattatggcgggcatcgtatactcaaatgaaaaccgattggacaaaccgggtgaaaaaatcgcccgggatcttccgttaacggtaaaaggaaaccctcttaaatacgtcagcagaggcggattaaagcttgaaaaagccttggaagtgtttcctgtctcggtaaaaggcaaaacgatgattgacatcggctcgtctacagggggattcacggattgcgccctccaaaacggagccgagcggtcctacgcagtggatgtcggctataatcagcttgcttggaagctcagacaggacgagagggtcgtcgtcatggaacggacgaattttcgctattccgagccttccgatttcacagagggtttgccggaatttgcgacaatcgatgtttctttcatctcactccgcctcattctgccggttttaaaaacgctgcttgtaccggggagcgattgtattgcactggtaaagccgcaatttgaagccggacgggaatccgtcggaaaaaaaggcattgtcagagatcccggcgttcatactgacgttctccgccgcatgaatcaatttgccgcttctgaaggatatacagtgaaaggactgtccttctcaccgattacagggggagacggcaatattgagtttctgcttcatttggaatggggcggagaagacggaaacggcgctgaactgccggaagaagacattctccgtaccgtccgcgaagcacatgaaacattaaaagccaaaaagacagatgtaccggaataatagggggctattattccttttttctgccatcatgtactttttatcaagaagcggttaacataatgacaagaacagcttgaaaacagaggtgcttacatgacaaaaggccaaaggcatataaaaatcagagagcttattacaagccatgagattgaaacgcaggatgacttagttgacatgctgagagaagaaggatataaggtaacccaggcgactgtctccagagacattaaagagctgcatctcgtaaaggtgccgacgaacaacggctcctacaaatacagcctgccggcggatcagcggttcaatccgctgtcaaaactgaagcgttcattaatggatgcgttcgtaaaaattgactcagcaagccatatgatcgtattaaaaacgatgccggggaatgctcaggcaatcggcgctctgatggataatctcgaatgggaagaaatcatgggcacgatttgcggagatgacacgatcttaatcatctgcagaacgcctgaagatacggagggcgttcaaagccgtcttttggagctgctgtagcgtaattatcagataaaaggtggaatgctgtttgttagctgaactatcaataaaaaactttgccattatagaggaactgacgatttcgtttgaacgggggctcaccgtcctgacgggagaaacaggggccggcaagtcaattattatagacgccgtttccctattagtcggcggccgcggctcgtctgaatttgtccgttacggtgaaacaaaggccgagcttgaaggactgtttcttttggacagcggtcatcccgtttttgatgtatgccgtgagcagggaatagacgcatctgatgacatgattgtcatgagaagggacatcaatgccggaggaaaaagcgtctgccgtgtcaacggaaaattagtgacgattgcggctttaagggaaatcggcagacttttattagatattcacggacagcatgataaccagctgttaatggaagatgacaaacacttggagcttttggacaggtttgcgggcgctgaggccgaatccgcgcttcaggcttaccatgaaggctatgagcgttatatgaagctgctcaaaaaagtgaagaagctgtcagaaagcgagcaggaaatggcgcatcggttagacctgattcaatttcaacttgaagaaatcgagtcggcgaagcttgaattgaatgaagatgaccttcttcaggaagagcggaagcagatatccaactttgaaaaaatttatgaatcattgcaaaacgcctataatgcgctccgcagcgagcagggggggcttgactgggtcggaatggcctctgcccagcttgaagatatttcggatatcaatgaaccgctgcaaaagctgtctgaaagtgtgtcaagttcctattatttgctggaggatgcaacctttcagatgcgcaatctgttagatgatctggaatatgacccggaacggctgaattttattgaaacccgtttaaatgagatcaaacagctgaagcgcaaatacggagcgacggtagaagacattttggaatacggctccaaaatagaagaggaaatcgatcaaatcgagaaccgcgacagccaccttgaagcgctgaagaaggaattggagtcggtcggcaaagatgtggccgtagaagccgccaatttatcaaaaatcagaaaagcttgggctaagaaactggcggaagcgattcatcaggaattaaaaagtctgtatatgggcaaatcaacgtttgatacggaatttctcgtgaaaaccgatccgtcagccagtgaagcaccggttgttaacgggcagcccgtgcagcttacccaaaaggggattgaccttgtgaagtttttaatttcaacaaacaccggtgagcctttaaaaccgctgtcaaaggtcgcttccggaggcgagctttcacgggtgatgctggcgatgaagagtattttttcttcccagcaggatgtcacctccatcatctttgacgaagtggacaccggtgtaagcgggcgggttgcccaagccatcgcggaaaaaatccataaagtatcgaccggttcacaggtgctctgcattacacacctgccgcaggttgctgccatggcggatacgcaccttctgatcgcaaaagaattcaaagacggccggacgacaacacatgtcacgccgctttccaaacaggacaaggtagcggaaatcggccgcatgattgcgggcgttgaagtgaccgatctgacaaaacggcatgcacaagagcttctaaaacaggccggacaggtaaaaacgacaggataagctgctgatacaggcagcttattttttgttccatttctctaacagtgtatccaatgtttttcttcgtatgccggttataaatcaagcgcaggaaggcaaaagtatagatgtagcagaaaaagaaagtggtgtgggataggagcgaggagagtgaaggaatgaatgcacgataacatgaggaaagcaataggtgtaattctccttgtttctttactaagtgtaggcttttttaagccatttaaagaatatttactgataccgtcagaaatgagcgtctttgaaaaccagacacaggccgttccggtcaatgcatcaataagcgctgaaaagggcgaattatcagaagcctttacgctgaaagaagagcacggccatgcaaacataacagggcaaacacaaggccggtcagaagtagtatatgatcttgccgggtttcccattaaaaaaacaaaagtgcgtgtccttccagaattgaaggtcattccgggcggacagtccatcggtgtaaaactgcattcagtcggtgttttggtcgtcggctttcaccaggtgatgacaaaggatgggaaaaagtctccgggagaacaagcgggaattgaatctggcgacatcattattaaaatgaacggacataaaattgaaaaaatgagcgacatcgccccgtttattcaaaaagcgggcaaaaccggtgaatctttggatttattggtgaaacgcgataagcaaaaaatcaaaacaaagctgattccgacaaaggacgaagccgaggggaaatatcgaatcggcctttatatccgcgattcggcagccggcatcggcaccatgacattttttgaaccaaaaacaaaaaaatacggcgcattgggccacgtcatctctgatatggatacaaaaaaaccgattgttgtagaagacggagaaatcgtccgttcaactgtaacatcgattgaaaaaggaaaaggcggcaatcccggcgaaaaactggcaaggttttcgtcagaacggaaaacgatcggcgatattaaccgtaacagcccgttcggcattttcgggacactgcatcagtcgattaaaaacaacatttccgacaaagcgcttccgattgctttgtcaaatgaagtaaaaaaaggaccggcgcaaatgctgacggttattgaaaacgataaagtagagaaatttgatattgaaatcgtcagcactacgccgcaaaaattcccggcgacaaagggaatggtgttgaaagtgacagacccgaaactgctgaaaagaaccggcggaatcgttcaggggatgagcggaagcccgatcatccagaacggaaaggtcgtcggagccgtaacccacgtatttgtcaatgatccgacaagcggctacggcgttcatatcgaatggatgctgtctgaagcgggtgttgatgtttacgggaaagataaagcaagctgactgccggatgatccggcagtttttttatgtgatgcgttcttcacttctttcctggattcatgtaaaataagacatgaagatttttcgacaaattcacgtttcctgatttgtcaaacttaatttttagtcgaaaaacctagaaaatgctagaaaaacaaagatataccactattattggtaaatatggattttttaaaaggggaagtagtggttttgtcgaatgtaacatatagcagtcaaatgggttgcgtcctgttaatacattgggggaggaagaaacgtggagaaaattaaagtttgtgttgctgatgataatcgagagcttgtaagcctgttgagtgaatatatagagggacaggatgatatggaagtgatcggcgttgcttataacggacaggaatgtctttcgttgtttaaagataagaatcccgatgtgctcgttttagacattatcatgccgcatctggacggacttgcggttttggagcgtctgcggcaatcagagctcgagaagcagccgaacgtcatcatgctgacggcattcggtcaggaagacgtaacgaaaaaagccgtcgatttaggcgcgtcctattttatcctgaagccgtttgatatggaaaaccttgtcggccatatccgccaggtaagcggaaatgtcagcagtgtcacacaccgtgcgccgtccgcgcaaagcagcattatccgcagccagccggaaccaaagcggaaaaatctcgatgccagcattacaagcattatccatgagatcggtgtgcctgcccatatcaaaggctatctttatttgcgtgaagccatttccatggtgtataacgatattgaactcctcggcagcatcacaaaagtcctttatcccgacatcgccaaaaaattcaacacgaccgcaagccgtgtagaacgggccatccgccacgccattgaagtcgcatggagcaggggaaatattgattccatttcttcactgttcggatatacggtaagcatgacaaaagcaaaaccaaccaattcagagttcatcgcgatggttgctgacaagctgagattggagcataaagcttcgtaacgcaagattttggctagatgtctttttcgcgccttctattccgtgcatgaacgcggaagagaaggcgttttgaaattttgctgacgaaaacaatgggaatcactcacgccgttacttgttctatacataaatgcgagatctatgacgtctacacgtataataccggtgctgatattttaatgattttgccgtctctgaaataaaagcgggggacgcggcggcttaacacagataagacttcgtagctgatcgtaccgagcatttcggcaatttcatcaacggaaatctcggctccttgttgtttaccgtagatgacgacttcttctccttgtttgccctcattctcacctaaactgaccatgatcatatccattgtcactctccccgccaccggcacccgtctgccgcggtgcagaataaacccgcggttggacagggcgcgggagtaaccgtcagcatagccgatcggaatcgtcgcgatgatttcacccggttcggcgatatatgtggcaccataactgacggtccggggctctgtcgccatggccttcacataagcaatacgcgcctttaaacttagtgcgggtgtgagatccacgaggttcagttcctttatcgaggcggacggatataaaccatataaaccaatacctaaacggatcatgtcggcgctgaattccgggaatgcaatagcggcggctgtattgcacatatgcacggtaggcagcgtaatgtcttgattttttaaaaagctgagaaagctgataaacttttcgtgctgcagcatcgtcagctcagtgtccggttcatccgctgttgaaaaatgtgtaaagatgccatcccatgacaggtatgtactcgacttgagcgctttcaccactgctaaaagatcttcttccgtacgcacacccagccggcccattccggtatccacattgatatgaatggacagccgtttcgaatctgcttctttttccaatatccgattcgcttttttgatccagctgacctgaaacgctgataatgttatgttccaaacggcagattttttcacacagctgagagctgtgaagccgagcacaagaataggtgccgtaattcccgctctccgtaacacaattccctcttcgacacttgcgacagcgagctcgctcgccccgctttccagtgcctgccgcgctacttccacagagccgtggccataagcgttcgcttttacgacggccataattttagacgtattcggaatatggcggcggatcgcccgtacgttcttttttatcgcatcaaggtcaacttcaatccaaacttcccggcaaagttttttcatcacgattccttctttccttaatgagtttcagtactcatgctttcaatctgcattctattcaccttgaactgaaatcattcaaaacaagggaaggtggtcgctgatgtttaaagatcaaggtttcaggaaatcagtgcgcctgctttatttatgctgaaagggctgcatggcagcccttaaattgactttacaatattctgatctgaaaattgatgttcaaacattttggagtggctcacagcattgttttgaatgacaatgccgatatttccccctccggcaccgaaaacggtttttgatgcagtcagcggactgatggatatggcgccgccaacattgacaactccgtttcctgatacgttgtttatcgtaatcgggcaaccgctcattctattttttctcctttctctcacagtctactaactatatgtacgctgtgatatggaataagattaaacaaaacggcaaaaagaatccggctgctgccagccggaaagggaggggaatggagatgtcatagtgttttcgttacattttgatcagagtattgagagcttgaagattgagatgtactggattgattcatttgcaggaccatccctgtatttcccccacctgagccgtagacggtttttgatacggttaaaggacttatcgaaaacgcaccgccgacattgacaaccccgtttccggaaagactgttaatcgtaataggaaaaccagccatcatatacggtctcctttctattaatctatttactatatgtacgctgtgtgtaagaaataggagtaaacaaagcggtaaaaacttgtgaatcaaaaaaactgccggacatccggcagtttttttagtctacttttcaaacggcacccagccgcctgtattctgaatcatttcccataacggttcaggaagtcggtatttctcaatttcagatgcttgaatggctttttcgatttcctgttcgcggccttctttgaccagcaccgcccattcggggttaatcaaaatgacacgtcccagagccaccagcggaattccgctttctaatacggcaagcgcttcgtccgcggtatagatggaaccgacggccatcagcggcactttatggccgacgcgttcgtttaataaatccatccgggtccgtgaagtatccgctccgcggcgggctttggaattgacatccatcagtgaaatatgcagataatccaagttctcttctgcaagcgcgtcggcgagcatgaatgtttctttcattgtaagccccggtgtttccggctcttccggtgacaggcggtagccgagaacgaatggattttcagcgtgtgtatcaattgcctgtttgacagcatcaacgactgcaagcgggaacgcaaggcgcttttcatcgcttccgccccagcggtctgtgcgccggtttgttttcggtgaataaaattggtgaatcaggtacccgtttgccccgtgaatttcaacaccgtcaaagccggcttcaatcgctctgcgtgtcgcttcgccgaatgctttcacgatgtgctcaatttcttgttcggttagagcccgggacgtttgtctcccgtcttcttctgagccgctcggactgacgacgtcgttgtttggcacgagttcaggagggcattccaatcctccgtggtgaatctgcacaacggctttcgctccttgagactggatcgcctgagcgagttttttcaagccgggaatgtgagaatcatcatagatgccgggctggcctggaaacgctttgccgtccggcgttacgtttgcacatgccgtaatgaccatgcccatttcttttgaacggggagtaatgtagcttaattcacggtcggaaattgttccgtcatcatttgatgaatagtgtgtcatcggtgcgactgaaatgcggtttggtatagtgacgccgctttcgaacgtaaaaggttcaaacagcggtttataagtttgcttcatcatttcgccttcttccttaggagtttaactcgtccgtattctagcttatgttttaattgtgtgcaattattttgcttgttcttcttcctgaggttatgaccggctgaaccatttaaacgaatgaaacggttttctccgttccttttcaggatctttatatcctcctgaaatttgatggccgatcgagctgaatatgacagcggcggtgaagaggagaatgatttttttcatatgcatatcttctttcttatctttcacaaggttatttataagcatacgcttgtgcgaaaaaaccgtcaatttgtttttatttattcttttttccactttcctgcggcgaatatcgttccgatctgaatcacaacacttaacagagcgcacactgccacaactgtgttgctgtccatagaagacaccctcctttttgttaggttgatgtatcatatgacagctgtctctgttttgacaaaaccgtaatgcggtgtttcatatttttcaacacaaaaagggcgcttttttaagcgcctttacttttttttcagccggttcaaagcgatttgaacggcgatggcgtcatccaggtagccgatcggaaacatgtaatccggaatgacgtcggtcgctaaaatataatacagcagcgcgctcccgagaatcgcgcggtcttcagccggtgttgattcatccatatactgatgatgcatgtttttcaaatgatcaataaaagggccgacgctttcttcattgtccattttcttttgaaactcatcgcaaatcaagcgatggccctgctgggttttggcatattgttcatatctggtcagttcgcgctcgatttgctcccgggaaaaaggctgatcaaacatctcggccatattcagcatatcctgaatcgcgtgcatcgggtcttgcggcgcagcttctttttcatggccgatgtctatgcctgatgcctcaagcaattcctccagcggggtgcggagatgttttgaaaattcctgaagatgctttaaattggccttctgcttgccgtttataatccgggagatggtggccgtatcaatatttgttaaggcgccgagttttctcatggagagcgagtgcttatcaagcagtgattttaaaaggggccccagtgttttatttttattttctgtcaagggtatcacctcgtttccgccggaatgatgatcattaatcaataatttttgcagaaaaggtaccttttctgtgctgctgaataggatagtgtagattcaacggcacaacatgttgaaaagacatcaaagaatgggagagaaacgaacatggcttggttattgattttaggtttggcagtgtcctcgagcattgataatttaggagtggggatgtcatacggcatcagaaaaatcaaaatatcgcatgcgtcgaatatgatgatcgcttttatctgttttgtattcagttatctcggaatttatttcggcaaatggatttcagccgttttaccgggctttcttcctgtattgctggcggcgtttattttatctgtcatcggtatccgcatcattctgctggctgtgccgagaaaaacagcgcgtgttggcccgtcaggaaaaaaaggccgttttgccggtctgctgcaaaatccggaggcagcggatgccgacggttcgggagaaatcggtatattggaatccatggttctcggggtggccgtatccgcaaatgcgctgaccaacggattaagcgcggggttgatcgggctttctcccgctgccatttccatcactgcggcggtcggaagctttttgaccatatgggtcggctgctcgcttggaaaaaaagccgcgtcattgcgcatcggttcttttcacgtcggacagttcagcacggtgctgagcggagtgattattctcatcatcgccgccaatacgctgctcttttaagttgtcccgttcattttatgaaaagctcaaaataaatatgaatgtttctattcgggagagcgcatgacgcggctcttttttttgccgatctgatattttttcaaaatgaacagaaagtcgtccgtttccgttaaattctgcatattcggccttcagacagaacctttttcatagactgatcagcttgttttctttctaagttcaggtaaacagcaggtcagatagccttcattccaaatatggaaaagcgctggaggaatgaaggctccctttacaaatcggccattctgttcaaagataaagccgaatgagaaaacgtgaggtgatctgtgtgaagtctgtcatacttctgatcttcaccgcatggctgttatcaggctgcgagtataccgcggaggctgatgcggcgccgtcatttacacaggaaggaacatttataaaagcggccggaaacgatacgatcgcggtcgaaattgacggagaaaggcaagaggtgaaggtgcctttcgctaagcggtttgaatgtcagtctctgcctgaacatacggcggtgcaaatcacctataaaaaagagagcaacggacaattacggcttgaggaactgaaaaaagaaacagatatgtgaaaacggggaggaaaaaacgtgggtttactgacaaaaagcgctgctgccttcggtgccgctctgcttctgcttgcgccgtctgcttatgcagctgaacctttgcaagggaaaaccatttatatcgatgccggacatggcggagaagacagcggggccggcggaaatggactgcttgagaaaaacatcaatttagcggtgtcaaacaaggtgatcgccaaattggagacagaaggcgcaaaacctgtagcttcaaggactgacgatacttttttacgtttggacgagcgggtggcgaaagcaagcgccagccaatccgatttattcgtcagcctccatacgaattcagccgtctcaacggcatcgggcacggaaacgtattttaattcgacatatgaaggagcagacagcgaaaggcttgcttccgacatccagcagcagcttgtcacgtctttagggatgagggacagaggcgtaaaagaagctcctttttatgttattacatattcaaagatgcccagtgtgctggctgaattaggttttatcacaaatcctcaagatgcggacaagctgaaaagcgataacggccaagagcacgccgctgacgccgttgtaaacggaatcgaaacctattacagcggccggtaatgataaaatatgtgtaaatagcgccctccttatgtgcataacgattataatagagaaaaccgatgacaaacacctgaggtgacacatatgacgaatatttttgcccaccggggggcgtcgggcgactgccctgaaaatacgatgcccgcattcaaaaaagcgattgaggacggggctgacggaatcgaacttgatgtacagatgacaaaagacggccggatcgtggtcattcacgatgaaaccctcgaccgcacgacgtctttgaaaggatttgtgaaagatacggcgtatgacaaaatcagaaccgccgatgccgccggaaaatggaaagattcttttaaaggagtcagaattccgcttttgtcagatgtgctgcgttttgcggaacgtgctgattttctgataaacattgagctgaaaaacagtgtattccgttacgaaggaatggaagaagaagtgattaaaaaagtcagatattacggactggaaaagcgcgttattttttcttcatttaatcatgagagtctcgcggtttgccacgccctggcacctgaaattgaacgggcggtgctgacaatggatgtactgtaccggcctgaacggtatcttgcagccattcccgcttcgggttatcatccgaagctcggtacgccggcggtcagcgctgaagtgatcaaacatcttgcaaaacaccaagcggcgctccgtccgttcaccgtcaaccgtcctgaggatatgaagcagctgatgaaagcgggagcagacgcaatttttaccgattatccaaagctggctgtttctataaaagaagaatgccgcagctgagaagactgttcagacagtcttctttttttatgggcgggaaaaaggcggtgcactcataactcggtcagccggttcatatattgtaacagggcgttttgtgtaagcgttatcttttatcttattgaaagtgaggcaaaattgtgggaaaaacggttatcgtcagtgcggcaagaacgccgttcggaaaatttggcggcgcattaaaagaggtaaaggcagccgagcttggcggcattgccataaaagaagcaatcaagcgcgccgctatcagtgaaagcgaagcggaaggagcggtgatgggaatggtcgtccaggcgggtgccgggcagattccggcacggcaggctgcaagatatgccgggcttccgtggtccgttccggctgaaaccattaataaggtctgtgcatcagggctcagggccgttaccatctgtgatcaaatgatccgggcgaaagatgcggacgtgctgattgcaggcggaatggaaagcatgagcaacattccgtacgccattccggccggccgctggggtgtgaggatgggggacggagtgtttcaggatttaatggttcatgacgggctgacctgtgcgttcgaccaggtccatatggctgtccacggaagcactgcggccaaaaagtacggcatttcccggggtgaacaggatcattacgctcttttgagccagaaacgtgcggcagaggcggctgaagcgggcaaattgcgtgaagaaattgtccccgtcacctggaccggcaaaaagggcaaacagcatactgttgaagcggatgaggggctgcgtcctgatacgagccttgagcagcttgcagcgctcaagccaatttttacagccgacggaacggttacagccggaaacgctcccggtgtaaatgacggggccggagcatttgtgctgatgtcagaggaaaaagccgcaaagcagcatgtcaggccgctcgcagcgatacttggctttgcgtcagtcggactggaagcgtccgagctggcaagcgcgccgggagaggccatcagccggcttttgacaaaaaccggactgtccgttgacgatattgatttgtttgaagtaaatgaagcatttgcgtccgtcgtgctcgtgagtgaaaaaatagccgggttcagccgggaaaaagtgaatgtaaacggaggggcaatcgcgttcggccacccgatcggcgcaagcggagcaagaatcatcatgagtttaatatacgaattaaagcgtcgcggagggggggtaggcgtagctgctatatgcagcggagcggctcaaggagatgccgtcctgctggaggtgtactgatcaaaggagggagcgccggatgaagatgaaaacaatcatggtcgcaggtgcgggtcagatgggagcaggcatcgcgcagacggctgcagaagccgggtttgccgtcaagttatacgattgggagccggaaacggtaacaaaaggtcttcaccgcataaagacaaacctggagaaagagcaggcaaaaggacgaaagtcacagcaggagacagatgccgttttcagccgtatttccccggcagaactcacagaagcggaagatgctgattttataattgaagccattgcagaaaacaaaaaagcaaaagcagaattgtttgacacactagataaaatctgtccccctcatgccgtattggcaagcaatacgtcttctcttcccattacggagcttgccgcggccacaaaaaggcctgaaaaagtaatcggcatgcattttatgaatccggttcctgtcatggagcttgtcgaagtcatcagaggactcgccacatcggaagaaacggcggaaacagtaaagaagcttgccgtccggatgaataaaacccctgtcgaagtcaatgacttcccgggctttatatctaatcgcatattaatgccgatgattaacgaagccgtttattgcctttacgaaggagcagcttcaaaggaagcgattgatgcggtgatgaagctcggcatgcggcacccgatgggtcctttaacattagctgacttcatcgggctggatacgtgcctttccattatggaggttctctatgcggggctcggagatccgaaataccgcccatgccctctgctcagaaaatatgtcagcgccggctggctcggcaaaaaaagcgggcgcggtttttatgagtacggcagatgacgtaaagatcatgaggggagacggcagccatgcattttacagaagagcacatcatgatgagaaaaatggtgcgtgattttgcccgcaaggaaatcgcgccggtggttgagctcatggaatcaacagatgaatttccggagcggctgattaaaaaaatgggcgaagcgggattgatgggcattcccgtcccggaagcttacggcggggcgggtgctgatacaacatcttacattttagcgattcatgaaatatcaaaagtcagcgcggccgtcggcgtcattttgtccgtccacacatcggtagggacaatcccgattttgcatttcgggacagaagcccaaaaacaaacgtatattccgaagctggcagcgggcgaatatattggggcttttgcgcttactgagcctcaatccggatctgatgcgggaggcctgaaaacaacggccgtgcgaaaaggcggttcatatattctgaacggttcaaaaatctttattacaaacggcggagcggcagatctgtatctgacattcgccataaccgatccgggtaaggggagaaaggggatttcagcgtttatcgttgaaaaaaacacacccggtttttctatcggaaaaaaagaaaaaaagctcggattgttaggttccaatactgtcgaattgcagtttgaccaagcggaaattccgattgaaaaccggctcggcgaagagggcgaaggcttttcaatcgccatgaaaaaccttgaagtcggacggatcggcatagcggctcaggcgctcgggattatcgaagcggcgctcggctgctcggtggagtacgccaaaacccgcagccagttcggcagacccatcgcttcgaatcaggccgtttcatttaaattatctgacatggcgacgaatgcggaagctgccaaattattggtctatcatgctgctgatctgtatcagcgagggcttccgtgcggaaaagaagcatctatggcgaagcaattcgcgtccgatgcggcgatgaaagcggcggtggaggctgtgcagattcacggaggctacggctatatgaaagagtatcccgcggagcgtttatttcgggatgcgaaagttacgcaaatctatgaaggaaccaatgagattcaaaggctgattatttctaagtatcttcttcaataaaaagtgcgcaaaggagcgaaaccatggaatcttattctcccggtttagatggcgtcattgcggtggaaacggggatttctttcctggatacacagcagggcagtattttaatcaaaggccacgatctgattgagctttctaaaacggccggctatatggacattgttcatctcttattggaagacagacttcctgatgcgaaagagaaggcggcgcttgaagaagacgttcggcgcggcggacaccttcccgaggaaatcttgcacatatgccgtctgctgcccgaacatactcacccgatggacggactgaggacgggtttgtccgcgcttggaggctttgacaaggacatcgatgaccgttcatcttccgtaaatcagcaccgcgtacgcggactgataggcaaaatgccgaatctgacggtcaacagctatcgagtcatcaacgggctggagcctttggcgccggtcggaaccttatcatacagcgcaaactttttatatatgattaccggaaaaacgccgtcatctttggaagaagaaatcttcgaccggtcgcttcttttatacagtgagcatgaattgccgaactcaacgtttacggcccgtgtcattgcttcgacgcaatcggatatttacggcgcgctgaccggagccgtcgcctcgcttaaaggaaaccttcacggcggcgcgaacgaagcggttatgtacatgcttgaggaagcgaaggatacagacgggtttacacaattattaactcaaaaactcgcaaacaaagaaaaaatcatgggcttcggccaccgtgtctacatgaaaaaaatggacccgagggcgcttatgatgaaagaagcgttaaaaaagctgtctgatctttcaggtgatttccgtctttataatatgtgtgaagccggcgaaaccgtcatgagggagaaaaaaggcctttatccgaacttagattactacgcagcgccggtctattacatgctcggcatcccgataccgctgtatacgcctatattcttcagcgcacgcacggtcggcctgtgtgcccacgtcattgaacagcacagccgaaaccggcttttccgcccgcgtgtccgctataccggagcgcgcctgtaaacagatgagaaaggaagatgaaaacatgacagaaccccgccgaatggacgctgtaatcgaagagatttctgactacgtgctccatcaggagattgacagttcagaagctttcgctacggcaggacatgtgcttcttgatacgataggctgcggaattttggcgctcagctatcccgaatgtacaaagctgctcggcccgattgtcccgggaacctccgtgcccgacggcagcagagtcccgggcacgccttttgttttagatccggtcacggctgcttttaatatcggctgtatcaacaggtggctcgattataatgatacgtggcttgctgcggaatggggtcatccgtctgacaatctcggaggcatattggcttgtgcggattatatatccagagtgcggatttcagaagggaaagaaccgcttatcgtgcgcgatgtgctttgcgcaatgatcaaagcgcacgaaattcaagggattctcgctttggaaaacagcttaaacagagtggggcttgaccatgtgctgtttgtgaaagtggcgactgcggctgtttgcgcgcaaatgctgggaggctcaagagaggaaatcaataacgccgtatctcatgcctggattgataattcaagcctcagaacgtaccgtcatgcaccgaataccggatcacgcaaatcatgggcggccggcgacgcgacgagcagaggggtatatttggcccttatggcgcacaaaggtgaaatggggtacccgacggctctgaccgcatctgggtggggatttcaagacgtattgtttaaccggcaggaaataaagcttgcccgcccgcttgggtcttatgtgatggagaatgttctgtttaaagtatcctacccggctgaattccatgcccagacagcagcggaatgcgcggtccggcttcatccggaggtgaaagaccgcatcgaagacattgacaggatcacgattatgacgcatgagtcggcaatccggattatcgataaaaaagggccgcttcacaatccggctgaccgggatcactgcctccagtacattacggcaatcgggctgcttttcggagatatcacggcggatcattatgaagaggaaacggcgtctgacccgcgaattgatacattgcggagcaaaatggaggtgacggaacacaaagcgtactcaaaagattacttagacccgaataagcgatccatatcaaatgccgtacaggtgcattttacagacggcacggctacgggacggattgaatgtgaatacccgctcgggcaccggttccgcagaaaagaagccgttccgaaaattcttgccaagttttcagcaaacatcagcactcatttttcgttgaagcagcagcgaaaaatcgaagaggcctgcgaacatagcggccgaatgcagaagctcagcgttagtgaatttatggacttatttctcgtataaaataggagggtgacaaacatgacgtggatcgtcagcaagcagtcgtctcaagaggagcttgcagagcggttccgtacgctgatggcagcgccggatctattgcagatccccggcgctcacgatgcgatggccgctcttatcgccaaaaaaacggggttttcggctctttatttatcaggagcggcttacacggcgagcagagggctgcccgatttagggatcatcacgtcggcggaaatggctgaacgggttaaagatctggttcgctcgtctgatctgcccgtccttgtcgatattgacacgggtttcggaggagtgctgaatgccgcccggacggcgaaagaaatgtatgaagcgcgcgcggccgccgtccagatggaggatcagcgcctgccgaaaaaatgcggacatctgaatgggaagcagctcgtgccgattgaagaaatggcgcaaaaaatccaagcggtcaagcgggccgcgccgactcttcttgttgttgcgagaacagacgccagacagcaggaaggactggagggggcattaaaaagggcgtccgcttatataaaagcgggtgctgacgctgtttttccggaagcgctccaatccgaaagtgaattcagagcgttttccaaacaaatcagtgtgccgattctcgcaaacatgactgaattcggaaaaacgccgtattacagtgctgatgaattttccgatatgggctgtcagatggtcatttacccggtcacgtcactcagaacggcggccaaggcttttgagcgtattttccgccttctgaaagaagaaggctcgcaaaaagaggggctttcggatatgcagacgagaaaagaattatatgaaacgatcgcttacgatgactatgaagaactggatcaatccattgccaaaacaatactgccggacgactgaaaaagcccttttttttgcaagggctttttttacagcttttttttcctgaaccgcgggctgacttgattgcgtttccgatctctgtacagaataaacccggccagaacataaaggccgaacaaaaaaaacgccaatccggccgccccctgaagaaaaagggacggaaacggggaaaacgcatgcccgaataatgcatctctcatcagcttaatgccgagcgccgcgacagcgccggggaggaccagaatcaaaagcgcaacaagccggctcatattcagaaaacccctttacgatatgttttcctttattgtccaatcgaaaaaatattttgtcaagagatcaaaacgtggtaacataggggttgtgcaaattattgcaacgggaaatacaggtgtgcaaattttttcatataaaggggtatcgggatgcagaaggtgctgattataggtgctggtaaaggaggcacggcgctcctacagattttgatgaaaacaaagctgatccggattattgcggtggttgatcaagatccggaggcgcaagggctgcaagaagcccggagatatggaattgcaacctcatcagattggaaaccctacataactgaagatatagatattatcatccatacaacaggcgataaagcggtcatggatgagctgctccatgagaaaaaagaacaaaccatcgtcatgccgggaaaattggcgtacatggtgtttcagctgatggaggaaaaacagcagcttatccaaatgctgaagtcgcagacgtataagcatgaccggatttttaattcaacgcacgatggcatgatttttatagacgtcaacgaaacgatcattttatttaatcagatggcagaaaaaatggtcggccaaaaacgggaggatgtcatcggccgccaaattaaagatgtagtgccgaacacagagctgccgcggattctggaaacgagagagccggaatataaccagaagcagcttctcggaaagcacctgcagattgtcacgacaagactgccgatcattgatgaaggcggaaaacttctcggcgcgttatgcgtgtttaaagacatcaccgacgcagttgaactggcggaagaggtcacaaacttaaaacaaatccgcaccatgcttgaagcgattatacaatcgtcagacgaggccatttctgtcgttgatgaaaacggcatcggaatgttaatcaacaaagcgtatacaaaaatgaccgggctgtcagaaagcgaagtcatcggaaaacccgcttccaccgatatctcagaaggggaaagcatgcacctgaaagtattggggacaaggcggcccgtgcggggtgtgagaatgaaggtcggccccaataaaaaggatgttatcgtaaatgttgctcccgttattgtggacggtattttaaaaggcagcgtcggcgtcattcacgatgtgtcagaaattaaaacgctgactgctgagctgaatcgggcgcgccagatcatccgcacgcttgaagcgaaatacacgtttgacgacattatcggcacgagtgaacaaatgctggtcgcccttgaacaggcgaagctcggggcgaaaacgccggcgacgattctgctgcggggtgaatccggcacagggaaagaacttttcgcccacgccatccataatgaaagcgaccgaaaatacaataaattcatccgggtcaattgtgcggccctgtctgaatccctgcttgaatccgagcttttcggctatgaggaaggcgcgtttacgggcgcgaggcgcgggggcaaaaaaggactttttgaagaagcgaataacggcagcattttcttagatgaaatcggagagctgacccaaagcacccaggcaaagctgctcagagttctgcaagaaaaagaaattatcagagtcggcggcgctaaagcgatttctgtcaatgtcagaattatcgcagcgacaaacgtcaatatcgaaaaggccatggcggaaggcgcgttccgtgaagatctgtattaccggattaaccgctatccgatctcaatcccgccgcttcggcagcgcaaagaagatattgaagcgctgagcattcggctcattgaaaaaatcaatcaggattacggccgcaatgtaaaggggctcacgccgaacgcgctgcgagctttatcagcctacagctggccgggaaacgtccgggagcttgaaaatgttctcggacgggcaatgatatttttagagccgcacatggaacggatcgaacagcagcatctgcctgtttttgaatcagagctgaatgaaaaaaacggcacccaaagtgattttccggatgtggaaggggaaaagctgtctcaggctgttgaaaaatttgaagcgcacgtcattcaaaaaacgcttgaaaagcataaattcaaccgaaccaaaacggcaaaagcgcttggtgtcagcattcggaacctgtactacaaaatggacaagtacggccttgcaaatgacggcatgcaataaattgcagagaaagcgcaaacagctgcatgttttcttgaaaaaagccggaataaaccctcccgcatatttggcacggaacttgcattgttaaaagcggattcgcacaaggaaggtggtacaaaatgaagctgagagacctagttgaaaaagccgcggcaaaaaacgcaaaaaccattgcagtggcccacgcagcagataaagaagtgatccaggccgtcaaaatggcggcagaacacttgtcggcacgatttttactgacgggtgacagcggaaagctgaaagagcttctggcaaatgagccgaagttcaatgctgaaatcatccacgccgattcacccgaagaatctgcggcaaaagcagtgcgcgcagtgcgtgaacaagaggcggacgttttaatgaaagggaatctcccgagctcaactcttctgaaatcggttttaaaccgccatgaagggcttcgttcaaaaagggtgttgtcacatgtagccgtttttgaggtgccggactatgaccggctgatgtatgtgactgattcagcgctgaacattgccccgtctcttgaagagctcgggcatattctgcaaaatgcggttcatgtcgcacattcagtagggaatcctatgccgaaagccgcagtccttgccgctattgaaacggttaatccgaaaatggaggcgacgctgaacgcggctgcgatcgtccagatgtgcaacagagggcagattaccggctgcattgcggacggaccgcttgctttggataatgccgtatcccaagcggctgcgctgcaaaaagggatttccggaagcgtagcgggccaggcggatattctcttggttccttcaatcgaggccggaaatatgctttataagtcaatgatttattttgcgaaagcaaatgttgctgccgtcatcgccggtgcaaaagcgccgatcgcattaacgagcagagcggataccgcagaaaataaactgtattcaattgcgcttgcgatttgcgcatcacaagaacagtaggaggaacgaacctatggaaatttttaaatatatggagacttatgattacgaacaattggtattctgccaagatgaacaatccggattaaaagcgatcatcgcgattcatgatacgacgctcggcccagcactcggcggaacaagaatgtggacatatgacagtgaagaagcggcgattgaagatgcactaagactcgcaaaaggcatgacttataaaaatgcggctgccggtttaaacttaggcggcgggaaaaccgttattatcggagacccgcgcaaagataaaaatgaagaaatgttccgcgcgttcgggcgctacatccaaggcttaaacggaaggtatattacggcggaagacgtcggcacaaccgttgaagatatggacatcattcatgatgaaacagactatgtaaccggaatttctccggcattcggttcatcaggaaatccgtccccggttacggcatacggcgtctacaaagggatgaaagccgcagcgaaagcggcgtttggcactgattcactggaaggtaaaacaattgccgtgcaaggcgtgggaaatgtggcttacaatctatgccgccaccttcacgaagaaggcgcttctttaatcgtaacggatatcaataaagaatctgttaaacgtgccgttgaggacttcggcgcccgcgcagttgatcccgacgacatttactcccaggcgtgcgatatttatgccccatgtgctctgggcgccgtcattaacgatgacacgattaaacagctgaaggcgaaagtcattgcgggagcggccaataaccagctgaaagaaacacgtcacggcgataccattcatgaaatgggaatcgtatacgctccggattatgtcatcaatgcaggcggcgtcatcaatgtggccgatgagctttacggctacaatgctgagcgggctttgaaaaaggttgaaggcatctatgcaaacattgagcgggtgctcgatatttccgcgcgtgacggcattccgacatacttagcggctgaccgtctggctgaggaacgaattgagcgcatgcgccgttcaagaagccagtttctgcaaaacggccaaagtatattaagcagacgataggaatttgatctggaggtatgaaaatgttcgaaaaggaaaaacgcattctcattctgaatccaggctcaacatcaacgaaaatcggtgtctttcacaatgaacgctgtatctttgaaaagacgctgcggcatcccgaagaagagctgaaaacatttaacagcattatcgaccaatacgaatttcgaaaaataagcattcttgagtctttgcacgaacagggcatcaacatttcaaagttcgatgccgtttgtgccaggggcggcctgctcagaccgattgagggcggcacatatgaagtgaatgacgccatgatcactgatttgaaaaacggctacaacggccagcatgcttctaatctgggcggaattattgccagggaaatagctgacggattaaatatccccgcgtatatcgtcgatccggtcgtggtggatgagatgactccgctcgctaaagtatcaggaatgcctgaaatcaagcggaaaagcattttccatgccttgaaccaaaaagctgttgcccgtcaggcggcggcgtccctcggcaaacggtatgaacagatgaagatgatcgtcactcatatgggcggcggcaccacagtcggtgtccatgattgcggacgggtgacggatgtcaacaacgggcttcacggagaaggacccttcagcccggagcgcgcgggaaccgttccggcgggtgatttggtggagatgtgtttttccggcaaatattcaaaagccgatatgatgaaaaaacttgtcggcacgggcggactctccggctacctggggacaacggacgcggtgaaggtggaaaaacgcattcaggccggagatgaaaacgcgcgtctcatttatgacgccatggcttatcaagtagcaaaagaaatcggggcggcaagcgccgttttaaaaggaaaagtagacattatcgtcctgacgggcggattggcgtacgggaaaagtttcgtatccgccatcagatcgtacatagattggatttcggatgtactggtgtacccgggagaaaatgaactgcaatctctcgcgcaaggcgcgcttcgggttttagccggtgaggagcagtcaaagcaatatcagatcggcgaaggagtgaaaacaaatggcgactgagtatgatgtggtcattctgggcggcggcacgggcggttatgtagccgccatcagagcggcccagctcggcttaaaaacggccgttgtagaaaaagaaaagctcggcggaacatgcctgcataaaggatgtatcccgagtaaagcgctgttaagaagcgcggaagtgtaccgaaccgcaaaggaagcggcagcattcggcattgaaacggaaggtgtctccctccgctttgacagcgtgcaaaaacgaaagcagggaatcgttgaccggctggccggcggtgtcgcccacttgatgaaaaaggggaagattgatgtattcaacgggtacggacgtatgctcggcccttccatcttctcacctcttcccggtacggtttccgtcgaatacgcaaatggtgaagaaaacgacatgctgataccgaaacaattgattatcgcaaccggttcaaggccgaaaatgctgccgggtttagaagcagacggtacatatattctgacatcagatgaagcgttagagcttgaacgtctgccccaatccatgatgatcgtcggtggcggtgtcatcggaattgaatgggcatccatgctgaacgatttcggcgtcaatatcactgtgattgaatatgcggaccgcattttgccgacggaagaccgtgatatttcaaacgagatggaaaaactgttaacgaaaaaaggaattaagatcgtgacgggtgcgaaagtgcttccggatacattggaaaaagcggacggcgtttcaattgccgctgaaaagaatggaaaaaaagaaacgtatcacgcggaacaaatgcttgtttccatcggccgccagccgaacattgaagggatcgggcttgaaaacacggatattgaagcggaaaacggttctatcatcgtgaacgaagccgggcagacgaaggaatcacacatttatgcgatcggtgatgttgtcggcgggctgcagcttgcgcatgtggcctcccgtgagggcatcattgccgttgagcatatggcgggtcttaatccggctccgcttgatgccgctcttgtgccgaaatgtatttattcaaatccggaagcggcgagcgtcggtctgacagaagaggaagctcttcgaaaagggcatgacctgaagatcgggaagtttccgttcatggcgatcggaaaggctcttgtatacggagaaagcgacggctttgtcaaaatcgtcgccgatcggaatacagatgatattctcggtgttcatatgatcggcccgcacgtcaccgatatgatctctgaagcggggcttgccaaggtgctcgacgcgacgccttgggaaatcggccagtccatacatccgcatccgtcgctgtcagaagcgattggagaagctgcgctagccgcagacggaaacgcgattcatttttaaaaggaaagaaggaggggtttgaatgactacaaaccgccatcaagcattagggctctctgacgaagaagccgttgaaatgtatagaaccatgctgttagccagaaaaatcgacgaaagaatgtggctcttaaaccgctcgggcaaaattccgttcgttgtttcatgtcaaggacaggaagcggcacaagtaggcgcggcctatgccttaaaccgtgataccgactatgtgcttccgtactatagagatataggggttgtgcttgcattcggtatgactgcaaaggatttgatgatgtcgggttttgcgaaagcagctgacccgaactcaggcggaaggcagatgccgggccacttcgggcaaaaggaaaacagaatcgtaacgggctcatcccctgttacgacgcaggtgcctcatgcggtcggaatcgcgcttgcgggacgcatggataaaaaggatatcgtctcttttgttacctttggagaaggatcttccaaccagggggattttcacgaaggggcaaactttgccgccgtgtataaactgccggtcattttcatgtgtgaaaacaataagtatgccatttctgtcccgtatgacaaacaggtggcgtgcgagaaaatatccgaccgggcggcaggctacggcatgccgggagtcactgttgacggaaacgacctgctggaagtttaccgggccgtaaaagaagcgcgcgaacgggcgtctaaaggcgaaggccctacattaatagaaacggtttcctaccgtttgacgccgcattccagtgatgacgacgacagcagctacagagaacgcgaagaagtagaagaagcaaagaaacaagatccgcttcttttatacaaagcatacttgcaagaagccgggcttctaggtgaagaagaagaaaagaccatgctggatgacatcatggctatcgtaaacgaagcgacagacgaagcggagaaagcgccatacgcatctcctgaatcaacgcttgatcacgtttatgcgaagtagggaggaatacttatgtctgtaatgtcttatattgacagtattaatgcagcaatgaaagaagaaatggaaagagatccgcgcgtgtttgttcttggggaagacgtcgggagaaaaggcggcgtgtttaaagccacggcgggtctctatgaacagttcggagaagagcgggtgatggatacgccgcttgctgaatcagcgattgccggtgtcgggatcggcgccgcgatgtacggcatgcgcccgattgccgagatgcagtttgccgatttcattctgcctgcggtcaaccaaatcatttcagaagcggcaaaaatacgttaccgttcaaacaatgattggagctgtccgatggtcatcagagcgccttacggcggcggcgtgcacggcgcgttgtatcattcccaatctgtggaggccatttttgccaaccagccgggccttaaaattgtcatgccttcaactccttatgacgcaaaagggctgttgaaagctgcagtccgtgacgaagatccggtgctgtttttcgaacataagagggcgtaccgtctgattaaaggcgaagtccctgcggatgattacgtccttccgatcggaaaggcggatgtaaaacgcgaaggcagcgacattactgttattacgtacggattatgcgtccattttgctctgcaggctgccgagcgtcttgaaaaagacggaatttccgcgcacgtattagacttgcgtacggtttatccgttagataaagaagccatcattgaagccgcgtctaaaacgggaaaagtattgctgatcacagaagatacgaaagaaggcggcattatgagcgaagtcgccgccattatttctgaaaactgcttatttgatttagacgcgccgatcaagcggcttgcaggtcctgatgttccggcaatgccttatgcgccggcaatggaaaaatacttcatgatgaatcctgacaaagcagaagccgcgatgagagaattagcggagttttaaagacgtaaggaggtttttgacatggcgattgaaaaaatggctatgcctcagctcggagagagcgtgacggaagggacgatcagcaagtggctggtatctctcggtgatcaagtgaataaatatgaccccatcgcggaggtcatgacagataaagtgaatgcggaggtgccgtcttcttttaccggtacgattagagaacttgtaggagaagaaggccagactcttgcagtcggcgagatcatctgcaaaattgaaacagaagaaacggaaaccgaagaggcgccgaagcgggaagaagagcagaataccccttcagacaccgatgcaaaccgtcaaggtaaagatcagtcaaataaagcgcgttattcgccggccgtgctcagattagcgggagaacacggcattcagcttgaagaagttgaaggaacgggtgcaggcggaagaattacgcgaaaagacattcaaaagatcattgattcgggaatgcagcagaagtcggaagcaccggcgccggctgccgttcaaacaacgcaacaagcgccgaaacaacagcaaaaacaagcaccggcaccagctctgtcagccggtgatattgaaattccggttacaggcgtcagaaaagccatcgccgccaatatgcataaaagcaaaacagaaattccgcatgcctggacgatgatggaagtcgacgtcacgaacatgacggcgtacagaaacagcattaaagactcatttaaacagaaagaaggctttaatttaacgtttttcgctttctttgtaaaagcggcggctcaggctctcaaggagttcccgcagatgaacagcatgtgggcgggagacaaaatcgtccaaaagaaagacatcaacatctccattgccgttgccacggaagattcgctgtttgttccggttattaagcatgctgatgaaaaaacgattaaaggcatagccagagaaataacggatcttgcgaaaaaagtgagaaacggaaaacttactgcggaagatatgcagggcggcacatttaccgtcaataacacgggatctttcggctcagttcaatctatgggcattatcaaccatccgcaggcggcgattcttcaggtagaatctatcgtcaaacgtccggttgtcatgaataacgggatgatcgccgttcgtgatatggttaatctttgcctgtctttagatcacagagtgctcgacgggctcgtgtgcggccgattcctcggacgcgtcaaagagatcttagaaaacattgatgaacatacttccgtctattaaaaaaactccttttgcccgggcggcaaaaggagctttttttatttttattgtgaatcctcgggaacaagcatagtgagatgatgttttttcacttcgatcgtacaaggtgttgttccgtatacctcgccatctgtatccgcgtccatttcacgtccggtttcgatttcaattctggaggcctgaatataggacagctcccctttgaaatcatcaaatgaaccctgctccatcgtcatcagctcccgcagcgcggcaaggcttgtgttgcggcagattaacacatcggctaagccgtcccggaggctggcatcaggcaggggaactctgtttgtcccgatataatgcccgttcatgacaagcaccattacggcttcgtcttctttcacctcgccgtcaatcgtcaatttgacaggaaacgggttcgcgcttgtcatcgtccgcaaggcgctcgtgaagtagctgattttaccaagccatgctttttcagtttcattgatatggcttgatgcttcggtgatcagtccgatgccccagaagttcagaaaatagccgtcatccgttttacagacgtcaatcatccgtttatgtccggccgcgagcgcttcagcggccttttggaggttttgcgggatgccgagcgcccgggagaaatcgttgcacgttcctcccggcaaaatgccgacagcgggtctgtgatcaagcttgctgatgctgttgatgcattgatgcacagtgccgtctccgcctaaaatatataaatggtcaactgaactgtcgagattttcacaatactgacgggcatcatcctgatgtttggtcggtttaatcaaaagttcatcagctgattgggccaaaatggggacgaccgcgccgagcgttttatcaatctgcttttgaccggcgtttccgttataaattaaaactgctttccgttggctcatatgactgctcctttatttcagacaatctccttaacaagtttcccgtttttaaagggtcataaacttacatcgggaaacataaaagggacaaaaaacaattggatatgagcggtgtcatttgccgatagggaggttccttgctatcataagaagagatgatcaaaaaggagaggtcccagttgaatatggattttaatttatttatgaatgatgtcgtgcgtcaagcccgccaggaaatcacggccgccgggtatacggagctgaaaaccgctgaggaagtggacaaagcgctttcgaaaaaaggaacgacactcgtcatggtcaactctgtgtgcggatgcgcaggcggtattgcacggcctgctgcgtatcattccgtacattacgataaacgcccggatcagcttgtgacggtatttgccggacaggataaagaagcgacagccaaagcgagagaatactttgaaggctatccgccgtcctctccgtcatttgccattttaaaagacggtaaaatcatgaaaatggtggaacgccatgaaattgaaggccatgagccgatggccgtcgtcacaaaactgcaggaagcatttgaagaatattgtgaagaagtataagtgaaagaaaaaccccggagccaagcgcttgcggggtttttttatatggaatctgtataaatataaatatttatacatcggcgttcagctgtcactaatctgaaaaacaatgactataataaacacagaaaggaaaatatatttttcaaaaatagtattgcatcacaattaaaaagtgtttaaaatacaagttaacgaataaatattcaaatttaagagatcagtagatatgggggaaatgaatcatgaagaaatggctgttggtattagctgccgcatgtatcacctttgcgctgtccgcctgcggatcaggtaattcaggctcagagggcggaaagaacaagctgattatgggtacatcggctgactataaaccatttgaatataaagacggcgatcagatcaccgggtttgacgttgatctggcgaaagctctgggcaaaaagaccggctatgacgttgaggtgcgggacatggacttcaacagcctgattacagccttgaagtccaagcaggtagatatgattttatctggaatgacacctacgccggaacggaaaaagcaagttgatttttctgatatttattatactgctaacaatatgatcgttacgaaaaagggaagcagcattaaatccctgaatgatctgaaaggcaaaactgtcggtgttcagctcggctccattcaagaggaaaaaggcaagaagcttgcttcgaaatacggttttcagctcgaagaccgcaaccggatctcagacttaaccgaagagatcaaatccgggcgttttgatgccgcgattatcgaagacatcgtagcacaaggctatttcagttcaaataacgatctgcagggctttgcgtcagcagatgcgaaatcagacgaatcgggttccgcgattgcgttccgcaaagacagtgatctgacagcgaagttcaacaaagcgctgaaagaaatggagaaaaacggagaaatcgaaaaactgaagaaaaaatggtttaccaacgagaaataaaagaaagctcaacttttcgttgagctttttatcttgaataaagacaaaggagatcacacgtatgaatttggatttctcagcgacaatcccccaaattccttttatattggaaggccttgcggtcacattgaaaattgtgctcgtttcggcggtcatcggtcttgtattaggcatcgtgctaagcttatttaaaatcagcacgatcagtccgctgaaatggattgcagatttttatacttcgatattccgcggcacgccgctcgtgctgcagctgatgatcatctatttcggtatgccgcagctccttggctttcagatcgatcaattttgggcggcggtcaccgcattatcgctcaattcagccgcttacgtctctgaaattatcagagcgggaatcaacgcaattgacaaaggacaaaaagaggctgccgtcgctctcggcgtgccatacggaaaaatgatgaaagatctgctgctgccgcaggcgtttaaaaacatttctccggctattattaacgaattaatcaccttaacgaaagaatcggcgatcgtcacagttatcggtcttggcgacattatgagacgggcctaccagtccggcgccgcaacatacaactatttagaacctcttattgtggcgggcttaatctattacgtgctcgttttgatcttagcattcatcggaaaaggcgtagaaaggaagctgaaagccaatgattaaggtcgacaacctgtcaaaatcattcgggaaacacgaagtactgaaaaacatttcaacacagatcgaagaaggggaagtcgtcgctgtcatcggcccttccggttccggcaaatcaacgtttctgcgctgcttaaatctgctggaaaccccgagcggcggaacgattgccattaaagaaaacgaaattaccgcctctaaaacgaataaactgaaagtgcgggaaaatatcggcatggtatttcagcattttcatttgtttcctcataaaacggtgcttgaaaatatcacatacgcgccggtcagcgtgaagaaagagtctaaacaggaggcggaggaaaaggcgtgcgctctccttgaaaaagtcggactgcttgacaaacggaacgactatccgaatcgtttgtcaggcggacagaagcagcgggtcgccatcgcgcgggcgcttgccatgaatcctgacatcatgctgtttgatgaaccgacctcggctcttgacccggaaatggtcaaagaagttcttgaggtgatgaaagagcttgcgcagacgggcatgacgatggtgatcgtaacgcacgaaatggggtttgccaaagaagtcgcagaccgcgtattatttatggatgaagggacgatcgtggaagacgggcagccggaagaattttttctttctccgaagtcaaaaagagcacaggactttttagaaaaaatattataaaatataactggaagaaaagaagaagaatgctcttcttcttttttttgagaaagaaacaaacagaatggagcaagcaatgtttaaaatcggttaccgcacactaaagaccgcacttggaacggcgctggccatttatttagcccagctgttgcatctgcaaaacttcgcatccgcaggaatcatcaccatattgtgcatccagattacgcaaaagcggtcgcttcaggcctcgtgggcccgatttgccgcctgtttattggcaatcgtcttctcatatgtctttttcgggctgatcggctattacccgtttgcgatcggaatattgctggtgctgttcattccgactacagtcgttttaagaataaacgaagggatcgtcaccagctcagtaatcattcttcatttatatatgtccggcggcattacgatggcgtttatctggaatgagttccagctgattaccgtaggtatcggcgtcgcgctgttaatgaatctgtatatgccgagcctcgacagaaaactcgcggcgtaccggaaaaaaatcgaggacaacttttccgtcatcttcgccgaaatcgaacggtatttgttaactggtgagcaagattggtcggggaaagaaataccggagacgcatcagatgattcaagaggcgaaaaacctcgcctatcgggacgtgcagaatcatattttgcgccatgaaaatctctactatcattattttaagatgagacagaaacaatttgaaatcattgaacggctgctgccgaagattacctctatttcaataacggtggagcagggcaaaataatcgcccatttcatccatgaattaagggaagccattcatcccggaaataccgctcataaatttttaaaaagacttgcagaaatgagaacggaatttgaagaaatgccgctcccggcaacgcgcgaggagtttgaagctcgggcggctttgttccacctcctcggtgagatggaacaatatctcgtgattaaaagttatttcaaaggcatcaagctgtaaaaaacatatggatcaatcgcatgagtcctcctttcattggtcattctaatgaaaaaaggaggggagcccatgcgattttttttattgtcagccgccctgctgatgtctccgctttggccgcttggcgcaaaccctttgccgggtgacccttatattatcgtcaataaagccacaaatgcgcttgctgttgtgaaggataaccgaatagaaggcatttatcaggtggcgacgggaaaaacggatgatttgacgcctgaaggagaatttacggtaacggtcaaagccgtcaatccgtattaccggaagaaaaatgtagagggaggcgcgccggaaaacccgctcggcgtccgctggatcggctttgacgcgaaaggaaccgacggcaggatatacggcattcacggaacaaacagagaagagctgatcggggggtttgtgtcaaacggctgcatccgtatgaaaaaccgggatgtcatccgtattttccggattatccctcccggaacgaaagtattgattacaaaagaaaaccgctcattcgaggacattgcaatagagcggaaagccctcataaaaaagcaggaaacccccttgcaatgaggcgcctgcttttttaccgcaaatacatcataatgcctgagaggagggttgaaagtataaatacgcccaaaatgacgatgacggcgcttttcataaatttttgagacattgtttcactccttaagattactgtctatcattttaacgtgttttgcttgtatgaacaagccatatcctatggcggaaagcaggtggccgcgctatgaaaaaacttgatcatgtcggcattgccgtcagctctattgaagctgcgagaggattttacgaacggatgctcgggcttacgtatatgggagacgagctggtaagcggccaaaatgtgagagttgcttttttagaggcgggatgcacaaagcttgagctgattgagccgctgtcggacgcgtctcccgtcagctcttttttacagaaaagaggcgaagggctgcatcatttggcattccgctgcgccgatatgaaggaaacgatcaaggagcttgaagcatgccgcatgactttgatccatcatgaactgcaaaacggagcgggcgggaagaagatcgcatttctctctccaaaagaggcgaacggggtcctgattgagctttgtgaaacaattgaaaaaggagaaactcaagatgagcatgagtgatcatatcagacacttaaacgaaagacgttcctttttaacaaacggcggcggagcggaaaaaaatgaaaaacagcacaaaaaaggcaagctgacggcaagagaaagaattgattatttattggacgaagacagtttttcagagctgcagccgtttgccaaaagccgcatgcccgggtcccgaaatgctccgggagacggagtcgttaccggatacggcacaattgacggacggcccgtgtatttgtttgcccatgactttaccgtactcggcgggacgctcggcgagacacatgcggaaaaaatcgcggcggtaatggatctggcggcgaaaaataaaactccgatcatcgggctgaacgactcaggtggtgcgagaattcaagagggtgtggtatcattaaatggatacggtcatatctttaggcgcaacgtcctttactcgggagtgattccgcaaatttctgtcatccttgggccgtgtgccggcggtgctgtttattcacctgctttgacggattttgtgattatggcggaatatacgtcgcacatgtttattacaggcccgaaagtcattgaacaggttacgggtgaacagattgacgcggaaagtttaggcggtgcgggaatacataatgtgataagcggaaatgcccactattccgcacgaacggaaaaagaggctctttccgctgtgaaaaccctgctttcttatctcccgcacggcggacagacggcattgcccgttaaaaaagaagacgccagaccgttattaaacaccctcgttcccgcggacagttcgaaaccttacgatgtgttacaggttataaaagaactggcggatgacggaacgttttttgatattcagccgtattttgccaaaaacattgctgtcggttttctgaaactcggacggcgtacagtcggtgttgtcgcaaatcagccgaaacacttggcgggaagcctcacgattgatgccgctgacaaagcgtcgagattcatccgtttttgcgacgcgtttcatattccgttattgacgatcgctgatgttcctggatttcttccgggccttcagcaggagcatgcggggatcatccgtcacggagcaaaattgctgtatgcttttgctgaagcgacggtgccgaaagtgacgctcatcatcagaaaagcctacggaggcgcctatgtcgccatgaattcgaaagggctcggggcagatcttgtattcgcctggcccaatgcggaaatcgctgtgatgggagcggaaggcgcggcgtcgattttatacagcagagacatacaggcttctgacgacccggagaaaacgaagcgcgaaaaaaaagccatttacgaaaaggaaaacgccggtccgtataaagcggcggcctgcggaatggtggatgatatcatccggccggaagactcgaggaaaaaattgattcaggcatttgacatgcttgcgcataaggaagaggaaagaccgaaaaaaaagcacggtaatataccgctttaaacggagggaactgaaaatggtaaacgaaaaacgtctgcttgaagaatttcttgaactcgttcaaattgattcagagacaaaacatgaagcggaaatcagcaaggtgctcaaacaaaaatttactgatttgggattgagcgtaaaagaagatgatacaaaagaagtgacggggcatggcgccggcaacttaatctgtacgttaaagggcacaaaagatgcggatacgatttatttcacatcgcacatggacacggttgtcccgggcaaaggcgttaagccgattgtggaagacggctatgtaaaatccgacggcacgacgattctcggcgctgatgataagacgggtcttgccgcaatgtttgaagccattaaagtgctgaaagaacaaaacatcgagcacggcaccattgaattcattatcacggccggagaagaatcgggattagtcggggcaaaagcaatggatcgttcagacattaccgcgaaatacggttttgcgcttgattcagacggaaaagtcggcaacattattgtagccgcgccgacacaagcgaaagtgagagcaaccattttcgggaaaacggctcatgcgggggtagaaccggaaaaaggcatctccgcgattacaatcgcgtcaaaagcaatctcaaaaatgccgctcggccgtattgataaagaaacaacggctaatatcggacgtttcgaaggcggcacgcaaaccaatatcgtctgcgaccaggttgatattctggctgaagcgcgttcattagtgactgaaaaaatggaagcgcaagtgcagaaaatgaaagaagctttcgaatctgcggcagctgagatgggaggccgcgcggaagtggacatcgcggtcatgtatccgggtttcaaatatcaggacggcgatcaggttgtggaagtcgcgaaaaaagcggcggcaaaaatcggccggccgagcgaacttcagacaagcggcggcggaagtgacgcaaacgtcattgccggccacggcattccgacagtcaacctgtcagtaggctatgaacaaattcatacgaaaaatgaaaaaatgccgattgaagagctcgtcaaaacggcggaaatggtcgttgccattatcgaaacagcggccaactaaaaacgaagcacccagttgaatgggtgcttttttcattcttgataattggcttaaagctttgcagatacaagaaaaaaaccctgccggataggttccggcagggtttcagtattatgatttggcgggctccgcctgagccgcagcttgtttctttttatgatgcgtctgctgtaaaagtacattctgcactgtcaaaaacagtccgcttgtaaaccagtaaagcggcagcgcagccggtacgttaagtgaaaaaatggtcatcatgacagggaaaataaagaccatgatttttgctgactgcatcgcggccggattttgagcagccggtgaatatttctcgtttaatttttgggaaatataagcctgtaagaaatacatggcccccgcgcacagtgatacaagaatatcagaatgccctaagctgaaccacagaaatgagtgtgaagcgatttccggcgttgagcggatggcgtaataaaaaccgatcaaaatcgggaattgcaccagcatcggaagacatcccattgccatcggattcagattgtgctcacggtaaagcttcatcatttccatttgcagttctttttgtttttccgcatctttcgtttgttttattttagcctggatgctgtcgacctgcggtttgatcacagccattttttcctggaacacccgctgtttcttaaattggttcacaaacaaaggcaatacaacaatccggacgataatcgtcaccagaataatcgacagtccgtactcaccgtggaacaggcccgccacaccttttaaaagtgccgaaaacggctcgatcaggtaatcgtggaaaaaaccgatattcccgaggcctcccgtctgagtctgagatgtcgccgcaaaagccgagcggcctgtgcacagtacgataaaaaacaatccgaatgcgatccatttttgatatgttttagacaattatgtctcctcctttttatcttcacttgccgttataaaaggaggaagctgacatcttcatcatcattcgccggtgaattcatgcggatgactttacgtatccaagttgtaatgcgatgatatataataataagaaagtctgttcggttcagctgaacgactgcttgatgttcatctattcgtttcgttctccaatgctctcctgcgcggcgttcacgcaaaagaaaagcgatgccgatcgcggtcagagcgggaagaataattgtgaaaaaatcgactaaaaataaaaagtcattcattgactcaagaatcattttatcacatccattcagctcttattttactacatatatataaggttgtctatgaaaggaaaggaggcgccgggagtggccggaaaagggagaattatatttcatatcgatatgaacagtttttatgcctccgtagaaatggcgtatgatccgtctttaagaggaaaacctatcgccgttgccggaaacgtgaaggaacggaaaggaatcatcgtcacctgcagctacgaagcgagagcgcggggcgtaaagaccaccatgccggtgtggcgggcaaaacgcctctgtccggaactcatcgtcgtgcctccgaattttgaccgctaccggagttcatcaaaagaaatgttcagcattctgagggagtatacggatttagtcgagcctgtttctattgatgaaggatacatggatattacggacacaccgcacagacacagggcgtatgagacagccgaagacattcaggcgagactgcaaaaagagcttttgcttccgtcaagcatcggcatcgccccgaataaatttctcgctaaaatggcgtctgacatgaaaaaaccgctcggcatcaccattttaagaaaaagagagctgccggacgtcttatggcctcttccgattgaagagatgcacggtataggaacgaaaactgcggaaaaaataaaaacgctcggcatcaaaacgatcggtgatttggcaaaaggagatgaacatgcgctgaaaacgcttctcggcataaacggcccgaggctgaaggataaagcgaacggcatccatcctgcagaagtcaatcccgagcggatttatgaatttaaaagcgtcggcaactcatccaccctgtcgcatgattcggctgactgggatgaattaacgggcgtgtttgaacggctcgcgctgtctgtgagcgaacggctccagcgcaaggaggtcatggcctgccggctgttcatcatgattcggtatgcggattggaaaacagtcacaagaagcatgaccctcagcaatccggctgatcagaaaaaagacatcatggaagcggcgatggaactgtttgacaagcactggaaccaaaacccggtaaggcttctcggcatcaccggaacggaactggttgaaaaacagcaggcgtataaacagcttgatctgttttcattcaaggaggacgcaaaggatgagccgatttttcagatgatgaacgagctgaatgaaaagtacggccaaaacctgatcagaaaaggcgccgttataaaaaaagaagaaagcaaaacaaggggaacgagctttaacagagactttttccaggatgaaaagaaaaggtgaataacttgaaaaaaggggttatgtatgataatttctttagtataaatatcattttattttaatttaaattttaaaatggttaaacgtttgaagaagggacgttagaatatgtcaaaacaacaaatcggagttatcggtcttgcggtaatgggtaaaaatctggctcttaacatcgaaagccggggattttctgtgtctgtatacaacagatcaagcagcaaaacggaagagtttttagaagaggcaaaaggcaaaaatgttgtcggtacatacagcattgaggagtttgtccagtctcttgaaacaccccgtaaaattttattaatggttaaagcgggaactgcaacggatgcgacgattcaatctcttcttcctcatctggaaaaagacgatattttgattgacggcggaaatacatactataaagatacacagcgccggaacaaagagcttgccgaaagcggcattcactttatcggaacgggtgtatcaggcggtgaagagggagcgctgaaagggccttctattatgccgggcggccaaaaggaagcgcacgaactcgtgaaaccgattctagaagccatttctgctaaagtggacggagaagcttgtacgacatacatcggcccggacggagcggggcactatgtgaaaatggtgcacaacggtatcgaatacggtgacatgcagctgatctctgagtcatatttcattttgaaacaggtgctcggattgtctgccgaagagcttcacgaagtattcgctgagtggaacaaaggagagcttgacagctatctgattgaaatcacggctgacattttcactaaaaaagatgaagaaacgggcaaaccgcttgttgacgtcatccttgataaagcaggccaaaaaggaacgggtaaatggacaagccaaagtgctcttgacttaggcgtgccgcttccgattatcactgaatctgtttttgcgcgtttcatttccgcaatgaaagaagagcgtgtgaaagcaagcagccttctgtccggaccagacgttaagccggtcactgaaaataaagaagagctgattgaagcggtcagaaaagcgctcttcatgagtaaaatctgttcttacgcacaaggcttcgcccaaatgaaagccgcgtctgaagaatataactgggatctgaaatacggtgaaatcgcgatgatcttccgcggcggctgtatcatccgcgcggcgttcctgcaaaagatcaaagacgcatatgaccgtgaaccggagcttgacaacctgctgttagacagctacttcaaaaacattgcagaaagctaccaaggcgcccttcgccaagtgatttcacttgccgtagcccaaggcgtgccggtaccttcgttctcaagcgcacttgcgtattacgacagctaccgtacggcagtgcttcctgcaaacttgattcaagcgcagcgggattacttcggcgcgcatacgtatgaacgcacagataaagaaggcattttccatactgaatggatgaagtaatgaagaagcccccgcagttattgcgggggcttttctgatatcaaaaaccgcgggccgtcatgaacggcgccgcggttttttgatgttttcttatatattccaccagtggagaccgtctttttcaagaagatcgtccgaagctttcggtcccattgacccggcttcataattcggagaaagggttttgtcggctgcccacgtttcggaaatcgcatcgacgaaattccaggaaagcgccacttcgtcccaatgggcaaagtttgtcgcatcaccgagcagacagtcatggattaatttttcataggcttccggtgtgttcatttcgtcactgcagttgctgcagtaatccagcttaatcggctgagcatgtgcggctccgcctaattttttagcgttcagatatagtgtgatgccttcatccggctgaatatggatgacaagcaggttcggatttacattcgtttcattgccgtaataaaggttcatcggaatgtctttaaattgaacgacgattttcgttgatttttctttcatccgtttccctgtgcggatataaaacggaacgccggcccagcggaagttatcgattaacagctttccggacacgaatgtttccgtattggaatccggtgctacattttgctcatctgtatagctcggtacagcgtttccgtcaatcgttcccgcttggtattgtccgcggacgaagaagtcacttacttcgtttggagcgacagggcggagtgctctcagcaccttcactttttcgctgcggatttcttccgtgttcagtttaatcggcggttccatcgccaagagagcgaccatttgtaaaatgtggttttgaaccatgtcacggagtgcgcctgatttctcgtaatatctcgcgcgatcctcaacgccgagatcctcacttgacgtaatctggatgtttgagatgtagcggttattccacagcggctcaaacagcgcattcgcaaaccggatgacttcgatattttgaaccatttgtttgcctaggtaatggtcgatccggtaaatttgatcttccgtgaaagcttcgcgtatttctttgttaagctctttcgcactcggcaggtcatgaccgaacggtttttcaatgacgagacgggaccagccatttgtcgctgtgacaccttcgtttttaagtgattttgcgatagtgccgaaaaactcaggagccatcgccaagtaaaacattctgttgttcgggatttcatatgtatgttcaagctgatcaagcaggacattcagctcctgataggaacccggattcgttacatcaaacggatggtaataaaaatgagatgtgaaatcgtctatgtctttttgcccggcagaagaaacagacgttttaacggtttcccggaggtcctcgtttgaccaaggtcttcttccaacacctacaactgcaaactcttcaccaatttgaccatttttatataaacggtgaatggatgggtaaagttttcgttttgccaaatcccctgtggcaccaaatattacaattactgcttttggtttgtcgtttgttttcacttagagtacctcactttatctgaagcatggtttaaaaccccgcatatttccttcattttaaatctaaaattcgttgaaagcaaacatttcagcctgttttttgcggtttgcggaaaaaaattaatcaggccggagaaggcccgggtgaattcacattttcagcctgatcctgtatccttagtagtacaaagatctaggaggaagcattgtggaattattatttttagggacgggggccggcatgccggcaaagacgagaaacgtaacgtccgtcgcgctgaagcttcttgaagaaaggcgttccgtatggctgtttgattgcggagaagccactcagcatcagatattacatacaacaatcaaaccgaggaaaattgagaagattttcatcacccaccttcacggcgaccatgtttacggtcttccgggtctgttggggagccgttcatttcagggcggtgaagaagagctgacgatttacgggccaaaaggtattaaagcctttatcgaaacaagcctgaacgtgacggcgactcatctgacgtatcctcttaccgtacatgaaatcgaagaggggacggtttttgaagatgagcaattcattgttaccgcagcatccgtcattcacggcgtggaagcgttcggctaccgggttcaggaaaaggatattcccggcgcattgcaggccggcagattaaaagaaatgaatatcccgcccggacccgtctatcagaaaatcaaaaaaggcgaaacggtcacacttgacgatggcagaatcattaacgggcgggattttttggaacccccgaaaaaagggagaatcgtcgctttttccggggatacgagggcatcagagcgggtaacggagctggcgcgcaatgcggatgtgcttgttcatgaagcgacgtttgccaaggaagatgcaaagctcgcacataattattatcacgcgacgacagaacaggctgcgcaaacggcaaaaaaagcaggcgccaaacagctgatcttaactcatatcagcgcaaggtatcagggggaatcaccgatagagcgtctcgaacatgaggcgaaagcggtatttgaaaacagtaagatcggatttgacttcatggaggtcactgtggagcggccttaaaaaatgaacgcttgacatttttttctggtgagatataataaaacgtaataattacgatttgtataaggggtgaaaatgatgcgtgtaaatgttacattggcctgtacagagacaggggacagaaattatattacgacgaagaacaaacggacgaatccggaccggttagaaatgaaaaagtattccccccggttgaaaaagtatacgttgcatcgtgagacaaaatagatcacgataacaaaagccattgtgccgttgcacaatggcttttgttttatcagtttaccgcctgataggcaggggcattcatttgctggcgcaccgcgcaccaaacatcataaatggcaaggtggacgatgtgcggttcatcgtggtgaatggcatgagaactgtttttggcctgaatccatccgctttgataagagacatcaagcatgcttctgtgcagtttcacccattgttcatgagcgtgctttaagcgctcatcccgctctcccgatgataaaatcaacagcggcatatcgccgaaatgaatctgctgatgcttgatctgacgaaggctcgtcaaaaattccgcgtgtgatccttccaatatgaactgtttcaaataggcggctttcatttcttcgggaagaagcggaagcactttcgtctcctgatcctcagaaaccggatcaagcatcaccatcccgagaatatcccggcggttccggctcgcccaaagtctgctgataatcgcgccgtatgaatgcgagacgacaagataaggaggcttgacgccggccttcagaagaagagtgtttaattcctgtaccatgtggtccgccgttctcttgtttcggctttgtccgcttttgccgattccggctctgtcatatgtgaaaaccccaaattcttcatctatgtcagcgagtaatgatgtccatgtttcagaagaagtgccgtagccggcttcaaagacgatcgtcacttcgccggcgcctttacggtgtttcgtataaaacggacacccgtcaatcagatatgtcctttccatccatgctgctttcattggagtcatcccctctaattggttctatagggaagacggagaagcttcggcaatcgtttctcaaaaaataaaaaaagagacagccggatcgaaaaactccggctgtcacttcatcaccatgctctgtcgtattgaaccggtgacggtatttcagtattcagctgcttcgctgcactccttgcaaagtgcggatcgcgcagaagttctctcgcgacaaaaataaggtcagcgcggttgttttgcagaatttcttccgccattgttcccgtcgttatcaaaccgacggcgcctgttgcgatttcggcctgttcacggattttctccgcgaagctcacttggtagcctgggaagatgttaatatcagcttgaacgagtgcgcctgagctgcaatcaatgaggtcgactccctgttctttcatccacttcgcaaaaccgatatgatccgcaatgtccagccctttgtctgtataatccgatgcagaaatacggacaaataacgggccgtcccagacttccttgacggcttcaatggtctcgcctaagaagcggtagcgattttcatgtgagcctccgtattcgtctgtacggtgattggacagaggggacaaaaattcgtgcattaagtagccgtgtgccgcatgaagttcaataatgtcaaagccggcttctttcgcgcgcgccgctgcctgtttgaattcctgaatggtttctttaatttgttctgtcgtcatttcagccggtgttttggactgctcgtcgaacggaatagctgacggagcgtaaatgtctccctcaagctcagctttacgtccggcgtgcgcaagctgaatgccgattttagatccttgcgctttcacttgttccgtcagtttggcaaaaccttcgatatgatcatcgctccaaatgcctaaatcctgatcggaaatgcgcccctgcggattaacggctgtcgcttcaacgataatcaggccgacctggccgattgcacgcgatatatagtgcgccatatgaaaaggctgcagttttccgtccttctcatgtgaggaatacatgcacatcggtgccataacaatacggtttttgatcgttacatctttaacggtccatggtgtaaataattttctggccatttatttcgcctcccggaatgtttgtagacattaattataacaactcatgatcattcagtcatataaactgctcacgactgagcgcattgttattattgttctggaagggcatttttttatacacatcggtgccgtatcttcataacaggcatttacagccgatcatatagcaaatatagatgagaaacgcaccgatgactgcgtggccacctttgaaccagtttgtcaggatgaaaatactgctgatgaagatcactgcgccgaaggcaccgaatattccgtttttttgagcggctctgaaatcgtcggggctcatatttttcagctgcaagtgaatattcagtaacgtcatgattggcagcaatgtgataacgcctgataaaaataagtatttcgacttgcttaaatacgcggcggccaccataacggtgccgccgataaaaaactgaatgagaaaactcatgctgaaacgctcaccttctgtttgttatcaagtataatgatggagacattgccattttatttttgattgatgtataagtaaactaaatataactaatgcattggataataaagaatgatatctgggagatgaagccggttggatttaaagaagcatttagcctttattaaaacggttgaaagcggcagtctgacccaagccgctgccatattgaattacacacagccgaacatcagccaaatgatcagtaaattagaggaagagtacggttttccgcttttgatcagacagcggcatggagtgaggcccaccgcaaatggcttgaaagtgttacatattatgaaggaaattcaaaaaaactatgaaaaactgtctgaaaccgttgataatattaatgggttagaaagaggggaagtccggctcggcactgttacgagcgtggcggtaaaatggctgccgaaaattttgagggaatttaatgagctgtatccttccattaaggtgcatttgtttgaaggaaattctactgaactggaagaatggctgaaagatgaccggattgatgcggcgatcgggacatcccacagcgagaagtggcatttttacccgttggccgaggatccgattgtagcggtgatgagcccgcagcatgaattggcgcaatgtgaaacggttccgttacatgtcatggagtccgtcaaatgtatcgtgccttatccggagacacattttgatgtgctgaaagtgctgaaggaagaaaagattacgccgcgggtcgcttatcaaatcagaggggatgaagcgattattgcaatggtgcggaacaatctggggatcagcatcttgccgcagcttttggtgaatgattgtgatgtgctcatcaaacggttcgaccggtatgtctccaggcagctcggcattttgacagctcatgcaaaggagacgcagacaccttctgtccagaaactgattcaatgcatacaagaatgggttgcggtccgtcaggcttctgtctgaagaagcctgatgtgcgtttaagccggttcaggataatagaccagcataaaatatgtcaccggttcatccgaggaattaaaataactgtgcggcatcgcccgaagtcagcacatatttttcgtcatgaagctcaaccgtcaattcaccgctctggatttatcttcccctaaatgtgatttttgcctcttgggcgcagcacggcttcaggtcaactatgccttgaaaacaaaaagtctggggttattttggtgtcgggctttcgtctgtttatataaaaagggcatcaacggcacatgctgttgatgcttttttgaaatgctagggtttggagagcacttcaattccgacgttgaccattttgtccagtcccataaaagacaggcagattttggcgcgtctttttcttttatcgatctttttaataatcccttccattcctttaagaggccctgaggcaacggttacttttgaattttcaatatagacttttgaataatctacaatgtctccttctccgatcagcctgataatagggaggatttcttcatccttaattgtcgtgaaataggttttacgctctttggaataatatgcgccgttattcacgattctgcatgaaatggggagttctttgattttatgaaatgtccgctctgtcatcttcgttttaaacagaacatatcccggaaacatctttttgagtgcctcgtatttgattccggcttttcgttctgtgacttttttcttgggtatgattgagtagagagcctgctcatcaaactgcagacgcagaaatttttgcactgcttcttcttttcccgactctacaaaaagtgcgtaccatttcatgactggatcctccttagaataataagaaattattatacaaagaaagtatttaatggatagtatttaaagtgattaaaaatttttctaattcgtcttttttttacataatatatgaaaatgaaaaataagtatagacccaattgacagagaagcgatgaaattttctttgacatgaaaagggttcagggaattatctgacatttatcccgaaacaattatgccgactgcccaccgaatataaaactgtggaataaatgtcagaaaataacgaaataaagccttgacattattatctataaattgatattattctctttaaatagcaactatttgttaaatttattaaattgatgtaaagcacctattaaatttcaatcgctgtttcggcacgttgaagaggaaatagggattataaaaatgattgtagtgtatatatctacatatacatgataagggagaagtgtgccgtcatggctgttttcgggcatattggcactgcagcttgtcatgcaaaacattcagtaaacaagcaagatgtcttgatataaattatgttagaaaaggaaaacacaatgcgtttgcgatttttaaacctgtgctgaatcgcaaacgcgtttgtgtttttatttttatgccggtgtttacatcaggcaatatatgaatataagagacgtttttgtatggagaaccacatgtgatgtacaaaattggcgatgcggaaaggatgaggataagatgcttacgtttgtgttcccggggcagggttctcaatttaaaggaatgggagccggactgtttgatgaatttcaagatctgacacgtcaggctgatgacatattaggctactctatagaagaattgtgtctggaggatccgaatcaccagctggggaaaacgcaatttacccagccggcgttatatacggtgagtgcactcagttatttaaagaaaatgaaagagtcggggagagagcctgattacgccgcagggcacagtttaggagaatataatgcgttatttgcggccggctgctttgattttgagaccggtttgcagcttgtaaaaaaaagaggggagctcatgagcaaggcagctcccggaggcatggcagcggttttggggtttacggctgaacaagtaaaagaggttctatccgattatcatctgaccggcattgatatcgctaaccacaattcaccttcgcaaattgtgatcgccggaacgaaacaagacattgaaaaagcgggccccgtctttgaaaaagccggcgtgagaatgtaccttcctttaaatgtgagcggcgccttccattcccgctatatgaaagatgctgaaaaagagtttgcagattatttagaagaaacggcgtttttgcctcttcgttttccggtgatctcaaatcttcatgccgcaccttataagaatgatgaaatcaaaacaaatctgactttgcaaatgaccaatcaggtaaagtggacggacacgatacgccgtctgatgggacttgaaaataatgaaattgcagaagtcgggcccggggaagtgctgacaaaactgacgcgtcagattaaaaaagatgccgtcccattacctatgccgaaagaagagtctgatactgctgatgttaaagcatcggcagctgatccgcaaaaaacggcgggaatgagattagggaacgaagattttaaaaaagattataacatccaatatgcttacatgacgggctccatgtacaggggaattgcttcggaacagatggtcattaaagcggcaaaagcgggaatgctgggctttttcggaacgggcggattgagtatcgaacggatcggacaggccatcggaaccatccggtctgcactgcggcaaggggaaatattcggaatgaatcttcttcatcatatgatgtcacctgacaaggaagtcagaatgatagatttatatttgaaaaacggcattcatcttattgaagcatcggcatttatgggcataacccccgctctcgttatatacagggcaaagggattaaccaggaatcatgacgggtcggtgtcagttcaaaacagaatcatcgcgaaagtatcccggcctgaagtcgctgaggcctttctgaatccggctccggctcatgtgctggaaagacttgtgtctgataatcggctgacagccggggaagcggcgcttgcaaaagaaattccgatggctgatgacatttgcgttgaagcggattcaggagggcataccgaccaaggggttccgtatacattaatgcctgccatgatcagactcagagaccgcatgatggagaagcacggttatgcgaaaaaagtaagaatcggcgcagccggcggcatcggcactccggaagcggctgcggcggcgtttctgctcggcgccgaatttatcggaaccggttctattaatcaatgcacggtcgaagccgggacaagtgattcagtgaaagatctgcttcaggaagcgaacgtgcaggatacgtcatacgctcccgcgggagatatgtttgaagcgggagcaagggtgcaggtgctgaaaaaaggactgtttttcccggcaagagccaataaactctttgacttgtacagacaatacaattctttagatgaaatagatgaaaaaacgaaaacattaattgaagaaaagtatttccagcgcggttttgaagaagtgtatgtgcagttgaaacgtgataaatctcctgaacagatcgccaaagccgaacagaatccgaaacacaaaatggcgatggtatttaaatggtatttttctcatacgacaaggctcgctctggaaggaaaaagcgaaagtaaaatagattaccaaattcattgcggccctgcgctcggcgcgtttaatcagtgggtgaaaggaaccccgcttgaaaattggagaaacaggcatgtcgatctgatcggcaaacagctcatggaagaaacagccggccttcttgcgcaaaggctggtatcgattacaggctgagtatgaccagccattacattttttctgcggaggacagaccatgctgattgaaaatcatgaattaacgatgagccatgtcgggttagggaatttgaatgagtacgcgctgctgctgttattcggcaacgcacacagtcaccatttaacggccggaacgggattccggcctgatcagatggccgatcaccaagggctgattttgtatccggcttattttatgacacatcttaaagttccttcagatcagcctcttgatcagtaccgattatgggacgaggtttccgtcggagtcgatatctcccggtttggagaaaccatattagaatctgattatttgttcgggccgaaaggagcggtcagctctgataaaggcgagtgggaccggggacgttttccttctatgaaagccaatagtttaattgtcgtcgacgtcacacaaacagaaggttcgacccgcaaagtctcagcgcctaaggctgagtgcattgcggaactttctaagctagccaagccgccttacgcgctgatgcggtcaaagaaaatcagaacggacgccttcggtatgaagccgggcaatctcaaaacagcagaccccgtttcatatcgggttcctgttgatcaggatgctgcgcccgggcatgccatggtgtttgcgaaattcagcaagataatggatgcggcggaatttgaatggatgacgcgccggtcgaagccgggttttccggtttcaatcgcgcggcatttatttttgcttgaaagagagacgtattattatggaaattgttttgcagatgaagagcttgatatttatatgacgggacacattgaagaatgcgatcccgactttcacggtgagtccctcggtatgatctcagtggcgaaaatcagctatcagattgaagtctatatgaaaagaaatcatacattgctggccatttccaaggtggataagctgctggcggtgccgacctcttcacaagatcatattccggattataaacgggtcatcagaagtttataaaatgaagaatggagctgaaagcaaatggaacaaaccaaggaaatgaagcagatcatcgctcaaatcattcaggacattcaagaacagcagtcatatcgggccgtcgaagcgggagatgatgtgagagtcatagaggatctgggcttctcatcactggatatcgctcaattagtcgcacagatggagatggaaaccggagtagatcctttttcccaaggagaaacgatttccagcattacaaccgtcggcagcatttgtgatatttatcaaaaatatatggacagtgctcaatcatgaaaacagaaagcgggggagatatcagctgggtgactgataagcttagggaaacgcaagacagtgagtttctcatttttaaagggcagacttttacgtatgatgatttgctgacacgaatcagcttttttcagaaagaacttaaacaaaacggaatacgtgaaggagaatgtgtggcgcttatcggggattattccccgaacgccatttttttgctgatggcgcttttgttaaaccgaaatatcgttgtccctctcagcaatgaatcaagggaaaagcatctcgatatgtttgaagacgcgaaagtgaatcaaatcattgaaataaatgaaaatgacagctggacgcttcgtgaaggttctgaaagcgactctcaccctctgcttgatgacctgcgcaagagaggggaatcaggcattattattttcacatcgggaacctccggcaaaagcaaagcatccgtgttaagcgccggccggctgcttgaaaaatataaaacggcgaagagaaaaccgctgcgtacgctcatttttttgaaattagatcatatcggcggcattaatacgctgtttgcgattctgtttaacgggggaacgatcgtcacatcagtcagcagaacgccggagtccgtttatcaggcggtcgacaaacatgctgtccaagtgctccccgccaccccgacctttttaaacatgctgctgatgtccaaggcggatgccggctataacctctcttcactccggctgatcacttacggcacagaaccgatgccgcaatcaacgctgcgcggcatccaccggatgtttccggatgtacggctgaaacaaacatacggattaactgaactgggtatattctcaacgaaatcaaaagacagccaatccacttggatgaaagtaggcggcgccggaacagagaccaaaattaccggaggcacgctttgggtccgttctgagtcggcgatgctcggctatttaaacgcaccgtcacctttcgatgaagacggctggtacgacaccggtgaccaggtggaaacagacggcgaatatataagaattctcggaagaaagagtgaaatcattaatgtgggcggagagaaagtgtttccggcagaggtggaaagcgtctttctggagataccgaatgtccgggatgttctcataacgggcagaaaaaatccgattacgggcgagattgtcgcggcagaggccgtgcttgaaaaagaggaagatatcaaatctttcagaaagcgggccgtagctcattgcaaacagaagctgcagccatatcagataccgcagatcatctctgttacagatcgaaaactgtctaatgatcgatttaaaaaaataagaaacgtgtaaaacaggaggcaaatatgaataacggaaaagtagcggtcgtcagcggaggaagccgggggctgggaaaagcgattgtacagacgcttttggatgaggattacaaagtagccgctttcagccgcagtgaatctgattttattaacacattgagagacagtgaaaagtaccgcggccgcttttattgggaagcggcggatgcggcggatgatgccgccatgaaacagtttgttcttcaagtataccgcaagttttccagaatagacggcttggtcaataacgccggtttgaaccttgatcagctgctgcccctgaccaatgatgaagacattgaccgcatactcaatctgaatatcggttcagtcatcaagctgacccgaaacgtttcccgtgtcatgctgaaacaaaattccggatcaatcgttaacataagctccattatcggctcaagaggatttaaaggcacttcagtctacagcgcatccaaagcggctcttgacggcttgacgcgaagcctggccagggagctcgggtcgaaaggaatccgtgtcaattcacttgcgcccggttttgtggacaccgatatgacgaaaaatatgccggaaaaacaaaaatcgcagattatcagaaggacgccgatgggacgtttaggcgaaacagacgatatgaccggactcgttcgtttcctgctttctcctgaatcgtcctttatgaccggacagacaatggccatagacggcggattaacttgttaaagcacagaaaaattcttttgtacaagggatggtatcctcatgaaatgtattaacgaatttttaagaacggtaatagcgcaaaagctgggtgccgaggtgaccgaagcggaagataaaaccgctttttttactcttggcgtgacgtctctcatcagtgaagaaatcatgaccatattgcataaagaatttaccggcctttctgaaacgctgctgtttgaatatccgaacattgagaaattgagtgagtttttaagtgcgcagaaacgaaatcccgaaagcgttcttgaattcaaagaaacggagcctgatacgggaagccggcaggaagaagaattgcttcctgtacaggcggctgaaaaggtgcctgaaccgggaacgggcgggagctctgatattgcggttatcggaatgagcggaatgtttccgaaagcggaaaaccagcatgatttttggaacaatttaatggaaaataaagattgtgtctccgaaatcccagaggacagatgggacagctcttattactcggaagagaaaacggcagaatacacgtcatacagtaaatggggaggttttattgatcatccggatcaatttgacccgctgtttttttctgtttccccgtgggaagctgatttaatggaccctcagcaaaaattgtatgtcacgtgctgctgggaagcgatggaggatgccggttacgggaacccggcggcgaggccgacggatcaaatcggggtattcgccggagtgacctggaatgaatattcattaattgcacacgaagaaggtttcctcaaaggtcagtacaaaggccccggctccttatattggggcattccgaaccgggtttcttatttccttgatctccatggcccgagcatcgctgttgatacggcgtgttcttcatcgcttgtcgccgtccatcaggcttgtcaggccattatgtcgggcgactgtgaaatggcgcttgccggaggcgtcaacctcagcttacatccgcaaaaatacatgtttttaagccaatcgcattttctgtcttctgaaggaaaatgccgcagtttcggtgaaggcggagacggttacgtgcccggcgaaggcgcgggagccgttttgttaaaaccattgaaaaaagcgattgcggacaaagaccacatttacggtgtcattaaggggtccgccactaatcacggcggcaaaacgaccgggtatacggtgccgaatccggaagcgcaccgggacctgattttatccgctctaaacagagccgcggtaagtccggcggatatcagctacattgaagctcacggaaccggcacggcgctcggcgatccgattgagatacgcggactgtctatggcatttgataaacagaccgatgagaaaaatgactgcggaatcggctcggtgaaatccaatatcggacatttggaagcggctgcagggatcgccggtttaatcaaggtgcttttaagcatgaaacatgaaacgcttcccgccagtctgcactccgaggaactaaaccgcaagatttctttttctgattcgccattttatgtcgtccgaaacaaccggccgtggccggctgaaggagataaaccgagaatcgccgcaatcagttcattcggcgcaggaggctctaatgcccatctgattgtaggtgcttatcagccaaaacggcaagcggacgggaatactgagcaaaaacctcatgccgtcgtattaagcgcacattccgaacagcagctgaaagaatatgccgggaaattgagcatctttcttgcccgattggaaaactcgccttctgccggcggatacagtctggaaaatatcgctgccaccttattgtcaggcagagagcccttctccttccggcttgctgtcattgcatcatccctttctgagctgaaacagcgattggacggatttgtgagcggtcacagcgacggcaggcatatgtacttcggaaaagcctcacccgggcggccggacgtttcaggccagtccgtttcagatcctgagaaatttgccgcgctgtgggtgaaaggccttcaaggttgcaaaaagccggaaacgccatatcagaaagttccgcttcctacgtatccgtttttaaaggaaacgtcctggctgaccgatcaaaaaaagcggtatacaaaaaagccccaaaataccaaaaggcgtgaagcgcttcatcctctgcttgatgagaatatttcatccgcccggaaaggaacgtttcaaaagatattttccaaggatgaatatttctttaaagatcatttagtgaacgaaaaatatgtgcttcccggagtctgtcatctggaaatggcggcatacggcgcggcattgtggggagaacgcccggccgtctctcttcaaagtgtgtggtacatggagccgattgtgacagggacagacccaagatccgtcatgatagagtttgaagcagaaaaagagcgtataagctatgtcattaaagaaaaaggagcggacggcgctctcttttcgcaaggagaagtgatttgtaaagaaaaaggagcgtcttttgaggccccggtctttcagctcccggcgccatttgcgcagagaacggagccgaaagacatctatcactcgttctctgaggcgggaatcgtgcaaaaggacagttttcaggtcatccgcgaattctcttatacagaaaggaaagcactggccaaattaacgctcccgtcacacttggaagccgattttaaacagtacatcctacatccgtccttaatggatggcgctgttcaaaccgcaatggcgcatgtgctgcaatttcaaaaagagcctgcgcttatcgtaccgttttccttcggtgaaatacagctgcttgaaccgttagcgaaaaccgtatttgtgcatgcggaggtaaaagcggcctccgttcaccaatttgatctgcatatttgtgatgagcgcggcgtgctgttggcggcagtgaaagattttatcataaaagaggtgcaggaaagcgccgggtttaaccaaaaagccggcctcacgccgaagaaaagccgtgaaacggaattgcttatgacaccggtttggaacaccgtcaccattccggaaaccggcatgcctttcatgcgtgaagaaaaaataatcgtcatcggggccgggccggattttcagcaggctttgaaagagatgtattccgatgtccgttttccggacatcacttctttggacagcgcggaacaaatggctgaaacactgaaagcgcaaggttcttttcaacacatgatatgggcggcgccggatcatcccgttccatccgtttatgatgcggatacggccgacggacaggagcacggggtcatgcagcttttccggctgataaaagcgcttctgcttctgaattttgacacggaacaactatcattgacaatctgcacgtttcaagcacagccgattcatgaacatgatgaggtcaatccgagtcatgcaagcatacacggattagcggggtcgctcgcaaaagaatacagcaattggagcatccggcttcttgatttggaatctcaaaggggataccggcatcttcccgatgtcttctctttaccggcggaccccgagggaaacccgtgggtctttcgtgcaggtcagtggcaccgccagcaattggccgtctgccagcctcatacagatgagccttcattataccggcacggcggggtttatgtgattatcggcggggcaggcggaataggagaagtatggactgaatatatgattcagacctatcgggcaaaaattgtctggatcgggagaaggaaaaaagatacacagattgaaagaaagctgaaaagacttgcggctttaggtcccgcaccgcaatatttcagcgcggatgctgcggattatgactctctcaaacgggcgtatgacaccattgtgaaggaaaatggaaaggtccgcggaatcattcattccgccatcgtgttatcagaccgaagttttgccaatatggaagaggagcagttccgcgcttcactttctgcaaaaactgatgtcagcttgcagattgcccgggtagctgaaggggaaccacttgatttcttgctgtttttctcctcgatgatgtcgtttcaaaaagcgccgggacagagcaattatgccgccgggtgcacgtttaaagacgcttttgctaagcggatatcacagaaagcgccgtatgctgtaaaagttgtcaattggggcttttggggaagtgtcggcgtcgtcgcttcagaacaataccggaaacggatggagcgggacggaatcgcttctattgaggcgcccgaagcgatgaaaacgctggaaaccctgctttccggacctcatgaccagctggcgctgatcaaaacgacagatccggtttttatgaaagacgatctgaaagaacaagtaacggtttatccggaaaagattccttccgcactcggacaattagcggttaacatcacgcacaatgacgaagctgagcggttaaaagcatcaagtgtcatgagctgcatgagagagattgaatcccttattgaaaaaatgcttgtatcaaccctttatgaaatgggagccgggcttgatcaggctttaccgttatttcaatcggctgccggcataacggtacaatacagcagatggctgaaagagagctttgtcctcctgaataaattagcgcttgctccggaaaaaacggatttagggcaggtgtgggaggaatgggagcggaaaaaagagacttggctgcgccagaaagacatgagggcgcatgtcagattggcagaagagacattgcgtgtgcttccagacattttaaccggtaagcttccggcaacggaagtgatgttccctgactcctccttccgtcttgtggaaggcatttaccgcaataatatcatttctgattttttcaatgacaagcttgctgacacattgattgcagttctgcgggaacgtctggaaaaagacccgcaggcgaaaatccgcattttagaaatcggagccggaacgggcgggacgagcgccgcggtcatgagaaaattgaaaccgtatgaagcgcatattgccgaatattgtttcacggatatttctaaagcatttcttttacatgcagaagacatattcggtccggaatatccttatgtcacttataaaatattcaacgctgagcagccggtatcaacagaagcgccggacatcggcacatatgacgcagtgatcgcgaccaatgtgcttcatgcgacaaaaaatatccgctctgcgctgcgccatgcgaaagcaatgctgcaaaaaaacggccagctgtttttaaatgagatcaacagccgcaccatattcaaccatgtgacgttcggccttcttgaaggctggtggctgtatgaggatcatgatttacggattccgggcagtccgggggttgagccggccggctgggcggaagcgctttcgcttgaaggattcgtccatcctctgtttccggctgaagccgcacacgacttaggccagcagattatagcggctgaaagtgacggaacggtcaggcttgccctcccgcaggcgtcagaagagaagccggagcgccgtccgtatgacgcagatggtctttcggatgatactttgcatttcagcctgagagaaaaaaacgttgaactgatgaagaaggtcatcggtgaagcgcttaaagtgccggcgcatcgtcttttatcccatgaacctttaaccgcatacggattggattccatactggtcgtcagactgaccaacgcgttaaaagacgtcttcggttctgtcagcagcactttgttttttgaatatcaaaccattgatgagcttgctgattactttctgtcttcccgtaaagaagcgctcgagcggcaattcgggaatggaccggctcttcccgaaaacgccggacgggtgcaggctcccgcagaaagcgccgcgccgatgccaaacgtaagggaacggggcatcacatatctgacggaattaataggaaaaacgctgaagattccgagcgggagaatggatccgtcggtttccttaaccgcatacggtttggattctattctggtcgtcaggctcacgaatgcttttcgtaacgtgtttgaccaaatgaccagcaccctcttttttgaatatcagacgatagaagaaatcgcggattacctgcttctttctcagcggggagcatttatgaaagcgatgggtgtgcgtgaggagcagctgtctgatcacacagataacctgaatgtaaaacaaaacaaaattcctcaaaacgaggaaggcagcaggacgaacggagatccctatatccaggatatcgctgtcatcggtctgtcaggtcggtatccgggcgccgatcacgttgatgagctgtgggaaaatgtaaaagccggcaggcattctattactgaagtgccgaaagatcgctgggactggaaaacgttttataacgaggaacgcggaaaatgggggtccatttattcaaaatggggcggttttctcgatgacattgataaatttgatccgctgtttttccgtatatctcccgcggaagctgaaaggatggatccgcaggaaaggttgtttctgcagactgcttattcaagcattgaagatgcggggtacaccccggccacgctttgtgacagccggaaaatcggagtctttgtcggtgtgatgaacagcaattacccgacagtccccagcgactggtctatcgcaaacagagtatcgtttttgttcaatttccaagggccgagtatggctgtggatacagcatgctcttcttctttaacagctgtccatctcgccgcagaaagcctgcggagcggaatgagtgaaacagcgattgccggcggagtcaatcttatcgttgatccggcccactatgagcggctgtccgctttttcaatgctgtctcccggtgataaatgcaaatctttcggagacagtgcggacggttttgttgacggtgaaggagtaggggcgattgtgttaaagccgcttgctcaagcggagaaagacggcgatcatatttacggcgttattaaaggaagcatgctgaacgcagcaggcaggacaaacgcttatatggtgccgaatccgaaagcgcagtttgatctgatcgcagagacgttgaaacggacagacattcacccgagaacggtcagttacttggaagcccacggaacgggcactgcgctcggagatccgattgaaatcgacgggttaacgaaagcttttcgccttacaacagaagacaggcagttttgttccatcggttccattaaatcaaatatcggacatttagaaagcgctgccgggattgcgggaatcaccaaactgcttctgcaattgaaacataagaggattgccccttcattgcatgcggcggaattgaatccgaatattgagtttgagcacactccgtttttcgtacagcaaaaagaaacggaatggaaacgacctgtcttgaatatcacgggtgaaatgaaggaatatccgagaattgccggcatttcctcgtttggagcaggaggttcaaacgcacatgtcatcattcaggaatatgtgccgtctgagagcctgaaaccaatggaaaacgtgctcgtttctccgcaaaacccggctgttatcattttatcagcgcgaaatgagcagcaattgacagagcgcgcccgccagcttctggatgatgtcataagaaaaaaacgttctgacggagatttggccaagatcgcttacacgcttcaggcgggaagagaaccgatggctgagcggcttgcatttacggccgagtcgatagaagaactgaaaatgaagcttatgagtttctcaaacgatcataatatcgaacatgctcatatctggcggggcaggacagccaaacatcattcattggcggcttcgctcacttctgatgaagatatggcgcttactataaatgcctggctgaaaaaagggaaatacggaaagctgcttgacctttgggttaaaggacttgacgtcgattggtcagctctttatcagcgcaacccgggccggatcagtctcccggcctacccttttgccaaagaccgatattgggtgacaaaagctgatgtgtcacttgacaaaacaggctcagcggaaagtaagaaagcagccagacttcacccgctgctccatgcgaatacatcgacctttaccgcccagcgctttacttctgttttttcagggcatgaaccgttttttgccgatcatatcgtcaatggaaaaccggtgcttccgggcgcggctgctttagaaatggcccgggccgctgttacgcttgccgctgaagacctgccgggcgggaaaacgggtgtccggcttaaacagatcgtttggctccggccggtgacggcgctttctgaaggagtgacgcttcatgtgaagcttcagccggaagaaaacggagacattgcttttgaagcgtatgccgaaggagaagagccgcttgtctttttccagggaaaggccgtgctccaagagacggagcgtgctcctgttctcaatgtggaagcggttcaggcgcgctgcggcggtcgtcacttgtcaaaggctgagtgctatgaagcgttcgacagcctcggcatcacctacggaccgtctcatcaggcgcttgacgccgtctatgccggaagcggagaagtgctcgcgaagctcactcttccgccgtccgcccgcgaggaaaaggagccgttcatcctgcatccgagcatgctggacgccgcccttcaggcttctatcggtctcgtgctctcagacggttctgcgtccggacggccgtttctgccgtttgccctccaggatatgcaggtgttttctgcgtgccgggagacgatgtgggcggtgctttcctcagcggacggcgcctatcatattgagctgtgtgatgaaaacggcgaggtatgtgtccgattgacggggcttaccgcccgttttctggaagaggaaacggaggaaaaatcgctcttgcttcagccaaagtggcaggaatcaccgccgaatgaaggcggcggacaagaagagtctttcagatacgtgacgctgtatggcggaatgaatgctgaggacataagcggcgccgtatgtgcggctgacggcgaaggaccgattgaagaccgttatgacgcttgcgcggcggagctgtcagcgatcgtcacgcgtcttatcaaagaaaaacagaagaaaaaaacgctgatccagcttcttgtccccgacaggggggaagacaatgtattggcggggctggccgctttcctgaaaacggctcaccttgaacatccgaagctgtacggccaagtcatccaagccgatccggacgagtcagcatcatcgcttcttgccaagctgaaagaaaaccgggcgcatcctgaacaagcggaaatccgttatgaagacggcaaacgtctcgtcagaaactggcgtcatctgccggcctctcaaagcgccgccgttccgtggaaagacgaaggggtctacctcctcaccgggggagcgggcggcatcggcctgattttcgctgaagaaatagcctcccgcgtcaaaaacgccgtcctcgtattaacgggaagggcggaagcgcttgataaagaccgctccgcccgcttacggcgcttggaagcgtcgggcgcccgcgtattgtatcaaccggttgacgtgacagacagggcggcggtcatcgccctcgtccgcggcatacaggaggagcacggaacactcgacgggatcattcacggcgcaggcgtgatcgctgacaactacattctgaaccagacagaaaacgaacggaagaccgtcatggcgccgaaggtgaaagggcttatcaatcttgatgaagcagcgaaagatgtgcggctggactttttcattctgttttcttccttggcgggaggcatgggaaatccggggcaggccggttatgcggcagccaacgcatttatggatgtttatgcagcccgccggaaccgtctcgtgcgggacaacgagcggagcgggcagaccctgtctgtcaactggccgctttgggaagaaggaggtatgcgcgtggacaaagagaccgaacggctgatgtatgaacagaccggaatgaaagccatgcgatcggcttcaggcatccaggcgctttatgcggcttttgcctccggagaacaccaggtcatggtggcagagggcgacgaaaaacggattcgaaaaaacctgatgtctgaaacgccggaaccgtccaatagcattcatgtgtcaaggaagacgcccgtccatatgccgaataaagtacaagcggaactcaaacatatgatatcaggcattctgaaggtgaaagaagacgagatagatgctgaatcagagatgagagattatggctttgattcggtttcattcacgcagtttgcaaatgaactaaataaaacgtatgggcttgaactgacaccggccgtattttttgaatacccgacagtctttagttttgcccaatacttgctgacggaacatccggatacattcggctcacaggcagaaacagaaacggagaaaccggttgtgcgtaaaaaaatgaagacggagccattctcgattccgtcccgccttcctaaaacaaaaaccgcagctgcacctgagcccgtggcgataatcggaatcagctgtgcatttccaatggctgaaaatccggaaatgttttgggagaatttagccggagaaaaggactgcatttctgaaataccgccggagcgctgggactggagacagtattacggagatccgcagaaagataaaaatgcgagcaatgtaaagtggggcggcttcattgatgaaaccgctcaatttgatcctttatttttcggtatttctccgcatgaagccgaaatgatggatcctcagcaaagacttttaatgatgcatgtatggaaagcgattgaagatgccggctgctctgccaaaagcctgtcaggtacaaatacaggcatttttgcaggcacgacaaacagcggttacgcccaggaagcttcaaagttccatatagagattgagggttcttccgccgccggaacggttccgtcaatcggtccgaaccgcatgagctattttctgaatatacatggaccgagcgaaccgatagaaaccgcctgttcaagctcattggtcgctgttcaccgtgcggtcagggcaattcaggccggagactgcggcatcgcgattgcaggaggcgtcaatgctattgtgtcgccggatatgcatatcagctttaataaagcgggaatgctcagtgaagacgggcgctgcaaaacattttccgatcaagcggacgggtatgtcagagctgaaggtgccggtatgattgttttgaaaacattatccgatgcggaacgtgacggcgaccgtatttatgccgttattcgcggaacggcggaaaatcatggcggacgggcggcttcccttacatcgccgaatccgaaagcacagacagaagtcatgataaaagcgtatcagcaagcgaacatcgacccccgtacagtgagttatattgaagcccacggcacgggaacggcgctcggagatccgatagaaatcaacggactcaaagcggcttttgcagcgctttatcagaaagccggagtaacggcacccgatcagcctcattgcggcctcggttccgtcaaaacgaatatcggccacacagagcttgccgccggcatggccgggcttttaaaaattattttgcagatgcagcacaaaacgcttgttaaaagtctgcattgtgaaaccgttaatccgtatatcagcctcgacggcagcccgttttatttcgtccgcgacactcagccgtggaaagcggcgactgatgatagcggaaatgaactgccgcggagagcgggtgtcagctcgttcggatttggcggtgtcaacgctcatgtcgtgctcgaagaatatgtttctcctgttgaagagaaacaatggacgtccggtgaacttcagccgtccttattcattctctcggcaaagacggcggaacagctgaaggaacgtgcggaacagctgcgcagatatttggaaaagacacattcagctgacggagctcttgcggatatcgcttatacgcttcagcttggccgggatgaaatggaagagcgccttgccgtcattgctgaaacaaaagaagagcttacgaacgcgctgaatgatttcctcagcggcaaggaggcggggcagaatttctttacaggccggaacaaagcgatgaaacagctgtttacagagatgacggacaacgcagaaatgagcgggaccatagatcaatggattgaagcaggaaagtatgcaatgcttgcaaaattatgggtgcaaggcttgcatgtcgactggaataaattatatccggacgaaaggccaaaaaaagtcagcctgcccgtctatccttttgcgaaaacacattgctggataccgcacagtgcgcagcatataaggcaccgggagacttatgagactgatatgtccccgcttgagacttatgagcgcctgcttgatgaattggagagaaacgaaataagcatagaagccgctgtaaaaagaacgatcggtttttacagggattagcgtaatggaggaaaccatatgaaagagtttctgcaccgggttttttctgacgtcaaacataaaaaaatgacaaaacaggatgcgatcggcattttgcgcgattatgatatgcggatgggacttcgccaagcggattcccttcatccgcttgctcagcagcatatttccgatgaaacgggactgggattctcggcagctttcagcggccgggaattttttctcgctgatgtttctttacagcgtaaaaagcttatgcccggagaacttcttttggaaatggcgagagctgcggctgttttgacagtaaaggagactgaggctgtccggctgacgcatatcgtgtggtcaaagcccattctgactgaggctgaaccgttccatatcgaaatcaggctgatacccgcagagggtgaagccaaaaggtttgagatttataatccattttctgccgatttcagtcatcatgatgtgtacagccaagggacgattcagccagttgatgctgcgcctggcatgctggatatcagccgcttgaaggaaaacagcggcttcctgatggatcagcagcaaattgaagccatcactcagaacgataccgttcaatacagtgagcacatgaaaggaattgagcgtatttacgcctcagcaggacggatgctggcagacatatcaattccattgacaaaccaaaaagaatccgcccgattcggcctccctccctgtgtgatgcaaagtgtgacagaggcatgcgcgctgcttggcggcaaagaatataaaacgctcgccccggtttcattggacgagcttttgttttatgaaccttgtcctgacaaggtatgggccgagatacaagagaaggcggggagcttttatattgatttatgtgacggagaaggaaaaatatgggcttccctgtcggggttgaagctgcagcctgtcatcaagacgggcgctcccggaaaaaccaatgccgaacaccgcagtgaacgtttgtatgaacaaacgcttcttcagctcaaaacgctttttgccctgactacaaaaattgctgtttccaacatagatactgaagagccgctggaaacttacggaatcgactcagtcactgtgacgaaattgaaccgcgaattgtctctgcttttcggtgacctttccaaaacggttttttacgaatataagacactgggctccctggcagctcactttgtcacggattatccaaaagaatgccgaaagtggacaaatgatgatgaccaccgttcaggcatatcagaacaggttttggcaaatgaagattttccggtgcttccgtcgtttatcaagcgaaagaaacggccttctttatccaatgagaaccaggcaaaagaagggattgcgattatcggagtcagcggacgttatccgcaagctgaaacacttgaagagtactgggataacttagcagccggaaaagactgtgtgacggaaattcccgaagagcgctgggaaaaggacaaatactacaaccctgatcccgaagcggccgtgaaagaagggaaaagttacagtaagcggggcgcatttctgaaagatgccgctttctttgatccgctgttttttcaaatttcaccccgtgatgctttgaatatggacccgcaggagcgtctctttattgaaatgtgctggcaggtgctggaggatgccggatatacgaaggaacagcttgagaatctgtataacggccgggtcggcgtttttgcgggcattacgaaaaacgggtacggaatgtactggaaaaacggcggcaccctgcagccgaaaacgtcgttcagttcagcggccaacagagtttcctattttcttaatctgaaagggccgagcatgccggtcgacacgatgtgctcgtcttcgctgactgcaatccatgaagcgtgtgaaaacatccttcgcggcgaatgcgacatggcgattgccggcggtgtgaatgtgtatacgcatccttcggcttatgcggagctcagcgcctatcgaatgctttcaaaagacggaacgtgcaaaagtttcggtgaaggcggggacggatttgttcccggtgaaggcgtcggggccgtgctgttaaagccgctgtcaaaagcgatggctgataaggaccatatttacggtgtgattcgcggcactcatatcaatcacggaggcagaacaaacgggtatacagtgccgagtccgagcgcccaggctgacgtgatttccggcgcgcttgaaaaatcaggaatacatccgcggatgatcagctgtatcgaagcccacggcacgggcactgaactcggagatccgatcgagattgacggtttgacccgcgcatttcaaacgaaaacgtcagataaaggcttttgcgccatcagctcagttaaatccaatatcgggcatttggaagccgcggcaggcattgccggtataacgaaactgctgctccagtttcaaaaacgcaagctggccccctctttacattgccggaaattgaatccgaatattgcattcgaccggacgccgtttttggtgcagcgtgaattggcagactggaaacggccggtcattgaggaaaacggagcgcaaaaggagattccgagaatcgcgggcatctcttcttttggcgcgggcggggtaaatgcccacatattgatagaagaatatattgaacctgatagggagatttctgagccattcacagatgaagatcccgcagtcattttattatccgccaaacaggaggccagcctgaagcagcgggcgcagcagcttcttcaagcgatcagaaaaaatgacgtcacagaccgaagcctccgggatgcggcttacacccttcaaaccggaagagaagcgatggaagaacgtgcggcgtttatcgtgacgtcgacagagcagttagcggaaaaactgcagcgttttattgatggcgggacagacagctgttttatcggaaaaagcaaacagtataaagacattctagccgtttttaaggatgaagatatgcaggacgccgtccgtaaatggatgaaacgaaaaaaattcgcgaagcttctggaactttgggtaaaagggctgaagattgattggtcagaactttataacgacagcctgccgcaccgcatcagccttcccggttatccatttataaaggaccggtattggccggtcgatgcagcgccggacaatgttcgtgatgctgaaacacattctgaaacatttcgtgaaacccgctttttacagaaaagctgggcagaaagcagcagtgtaccggctaaggaagtgcggggcgtcatcggaatagctgctgatcacccgacaggaaatttggccgttgagctgtcccgttatttccccgagtctgaaatcattgacgctgcgtcatcggaaatatccggggacgcgtcccggtttggcggtctgattgatgtgaccggatgcggaacggaaaccaatcatgatgacggctggattcatcgtctgcagtctctcattgacaacagaaaccgcggccgaaagcttcagctgctttgtgtgacaaaggggcttgaaccttttgcaaatgaaacgataaatctctcaggtgcaaaaaaggccggattgtaccggatgctccaaagtgagtataaggatatccgctcgcggcatatggatgcagaacggactgctgaagatcctgagctggcaaaccagatcgcagaggagttttttctcgattctgaagacatcgaagtgtgttacagaaacggtgtgcgctatcacgcgcggttaaaggaaacaaacagcttagcagaaaaagaattttcatttccgaaagaccatgtgctctggatcaccggagggacccggggactcggatatttattcgcccggcattttgccgaacgatacggagtcacgaaactcgtgcttaccggaaaagaaaccatgccgccgaaagcggagtgggatgatcatatcaaacggaattccccgttttctgaaaaagtgagaagaatcagagagctcgagcaaaaaggtgtccgaacggaagtgctgtctgtatcttccggccctgaatatgagcaggccgtcagccgggtgaaagatcaaatggggccgataggaggcgtgatacacgcagcgggagccgtagatctcgatcatccggcctttatccgtaaaacaagagaacagatgatgcccgtggttgagcctaaaacagacggactggacctgttgtatcaagcgctgcacaaggagcctctccggttttttgcgctgttttcttcagtgtccggcgtgatgccggatttaggagcgggacaaagcgattatgccatggctaacgcctatatggattattttgcggccgcaaaaggtttcccggtgctgagcattcaatggccgagctggaaagaaacgggtatgggggaatcaaaaagccgggcctatctgaaaagcggtttaaagagcatcactgacagagaagggctgagcctgtttgatgccatcatggcaggcgattgcggatctgttattatgccggccgtcattcacccggaaaaatgggagcctgaccgtctgctgctttcatccggccttactgaaacaaagcagcaggaacaggccgatacagaaagcgttgaggagtggctgacgggcatttgctgccgggaattaagactggagccgtcaagatttgaatctgatacaccgtttcaagattacggagccgattccatcatgcttgcccaagtgtccagagcgatcggaaagaggatcaaagctgaccttgacccggcggtgctgtatgaataccctacggttgctgcgctggccggatggcttgaaacagcatatccggaaatcaaagctgccgtttcaaaaccggttcagcctgtaatcccggacgttcccaaacaaacagcagccgctgttattcagccttctggtgctagagcggcgcaagacatcgctgttgtggggatgtcctgccgttttccaggagctgaatcaattgaagcttattggaagctgctgtctgaaggaacgtcagccattcaaagggtgccgaaagagcgctggaaaacggagaaggcggattatgcgggccttttaaaaaatgtaacgcattttgacccggagtttttccttattcccgaagaagacatcaaggcaatggatatccagtcctttcttatattagaagaggcgcttcatctgttcagagacagcggttactctttacaagaaatgaaaggcaggtcagccggtgtctatttaggaggacgcggcggcagtatgcctgacgaaaaccgtctgaagcatgcaaaaaatccgatagtcgccgccggcccgaattacttagcggccaatctttctcagttctttgatttgaaggggccgagtcttgttttggatacggcctgttcttcagcgcttgtcggtatgaatatggcgatacaggcgctttcttgcggtgaaatcgactcagcggtggtcgggggagtcagtctgctggaatccggtcaaacccaccggatgttcgaacttcgcaatctgttaagcgaagagcctgcgtttcatatttttgagcgccgcaccggcggcatcgtattgggagaaggcgtcggaatggtgtatttaaaaacagcggcccaggctgtaaaagacggggaccggattcatgcggtcattaaaggcatttccgtaaacaatgacggcagaaccgcggggcctgccacaccgaatatacaggcgcagaaagaagtgatggccaatgcgcttgccaaaagcggcagaaaagcggaggatatcagctacattgaagcaaacggttcaggctctgaagtaaccgaccttttggaactgagagcgattgaagcggtgtaccgtatgcaaaacagcgcgccttgcgaattggggtcgatgaagccgaatatcggacacccgttatgcgctgaagggattgccggtttcattaaaacagtgcttatgctctcgcgccgaatgcgtgtgcctttcctttcgggcaaagagccgatgacgcattacgatctgtccgcctcgccgttttatttttcgcacgcgctgcgtgaatggacggattcaccgcggattgccgccgtcagcagcttcgctgacggagggacgaatgcccatgtcatagtggaagcttgggagcaagaggcgtataccccggttagaaagcctttgccgagacaggaattaaaacgccggcccattcgtccggacaaagccgaaagcctgcatgaaaacgcacataagtcccgtccgaatacgttttggaaacaaatgaagacttactgattgcgctgaaaattgaacgtcgatatggaggaagttcatatgcaagagcagcttcttattaacaatcagcatcccgttctgaaacatcataaagcctatggaaaggaactgctgccgggtctggcttatattgacctgatctatcagactttcagagaaaacggtttttttcatgccggccttgaactcaggcacttatcgatttttcaccctttagctcctgaacagggagaatcaatcctgctttccgttgattgtacagagaacgtcgaagggcagtggaaggtagaggtgaaagggcaaaaacaaggtgacgaagcagcagagacaaaggtatatgccgcggcgcaaatgcattccgtcaagtccgccggcttccaagagagcgtccggatggatgccgtaaaacaaacggcggcagaaataccgcttgaggacatttacgcggaatgcagggatcaagaactggttcattcaggaatgatgaaaggctgcggaagcgtctaccaaactgaaaaagagatttatattgatctgtcggtgcaaaaggatcagctggaacatgcagaagagacgatgtttcatcccgcattgatagatgcgagcagcatcggctccaatgtatatctcgctcctttgacgagggaggaggggcaattatttctgccgctgttttatgaatcgttttattgcgccgaattgctgcagacaacatgtatcaccaagataaaaaaagaatccgtcacccgtaagaaagatctcgtttacgtgacaatggagtttttcaatgaggaaggcagaaaagtcggcgaactgaaaaacttcgccaataaactggtgagggacccggaactgatcaatcagaaacggcaaaagaaagaacctgacgggcggaatgccgtcccggttccccaagcggaaccggcgccttctgagccccgccgtgcggaggcttccaccggccttactgaacagtgcatcctttatttaaaagaattgcttgccgcccgattgaacaaacctgtgcaagagattgacccggatatcggctactatgaaatggggctggattctccggggctgttggacatggtaaaggaaattgaacaaaaaatcggaacgcagcttctgccgacactgttatttgaatacacgacaatcgcggaattggcgggatatttgtgcgaacattacggagccggtttcggccatgctcaaagcgggcattcaagtgctgagcctttgccccgggaaaaaaagaggacgacccaaatccgcgtgaaaaaatcggcgtcagccggaacgcagaatggagatattgcgattgtcgggatggcgggacggtaccccggcgccaaaaatcttcgtgaattttggacaaatttaaaaaatggagaaaacagcgtaacggaagtgcctcgttcccgctgggatacgaggacatatgagcatttgcgatcgccgtccggcaagccgatttccaaatggggcggttttatagacgatccggattgttttgacgcgaaatttttccggatttctccgcgagaggcagaagctaaagatccgcaagaacgattgtttttagaaacatgttgggaaacgattgaggatgcgggctacaccccggaaacaatcgttcagccgaaagggccgaataagagaatgaacgtcggtgtgtttgccggggtgatgcatatggattattctctcgccggcgctgaagctgcggccaaagggctggtctttccttatcccttgaactatgcgccgatcgcaaaccgggtttcatatttttgcaattttcacgggccgagcatggcggttgacacggtgtgttcgtcatccctgacggccgtccatatggcggcggaaagtctgagacgcggtgaatgtgaagcagctcttgccggaggcgtcaatttatcattgcacccgacaaaatatatcacatacggcttgatggatatgcattcgagtgacgggctgtgccgcacgttcggcgaaggaggcacaggctatgtctcagctgacggcatcggtgccgtgctgctgaagccgctccacaaagccgaagaagataaggatcatatttatgcggtgataaaaggcagcgccgtcaatcacgtggggaccgtcagcgggattaccgtgccgagccccgtggcgcagggggatatgatagctgaatgccttgaaaagacggagatcgatccccggacgatttcttatgtggaagcgcacggaaccggaacttctttaggagatccgattgaaatacaaggtcttgttaaagcttaccgcacgtttacagaggatcggcaattttgtgcgatcggttccgttaaatcgaatatcggacatgcggaatcagccgccgggatcagcgggcttcataaaacggttttgcagctgtttcacaaaacgcttgtcccttctttgcactcagagacgatgaatccgtatctccgtttagaggactcgccattttacgtgcagcaaaaaaccgagtcatggaaaaagccggcgtatacagagaacggcattgaacattcctgtccgagacgcgcaggcatcagttcattcggggcgacggggtcaaacgttcatctcattttagaagagtacaggcccaaaagccccggcattacggagaatcaagagagaccgtatattgtgcctctgtcagcgaaaaatccggagcggctgaaagaatacgctgcccgcctgctgatgtttctcaaagatgaagcgcctgaaggaagcgggccgcttcctgacaaaagagatacaatgcaaaatcagctggaaaatgcgttacgcagcgttctggcggatgttctgcatgtagaggccggcacggtagatgatgaacaggattggaaggaattcggcttggatgtcatgcagctgacacagttttctgagctgatgacggatcaatacgggctggcaatagacatgactgatctcatacagcatacttccgtccggactttagcagaatgtcttacaaacgatgagaaacataagaatattctttccggtcttttcggtcagtcgggcttagataagcagcctgatgaatctttttccatgcggtcactggcgtatacgctgcaaacgggacggatggcaatggaagaacggcttgtttttttagtgaacgatcaagcagacctgatcaggaaattaactgaatttacagaacaaaaacggcagattgacggctgctttcaagggcggtctgatagcggaacggaaatcaggggtttcctgaatgatgatcaggatacggaggagctgatccgaaaatggatggacagcggcacttacaaaaaacttgcggagctgtggtcaaaaggatttgagatagactggacgcggctgtatcaggaggagaaaccgcgcaggatgagtctgccgacgtacccgtttgcaaaggaacgatattggataccggagcccgatcatcccgtcacttccgtaaatacagaaagcaggcttcacccgctgcttcaccgcaatacatcagatttgctagaacaaaaattcagtacgatactgaacggagatgaattcttcttagccgatcatatcgtccgaaacaagcgtgttctccccggggcggcttatcttgaaatggcgagagctgcggctgaactggctgccgcgccgttagccgctggatacacggctaaaaccggcatttcgctgcggtatatcagctggatacgccaggccgttcataaaaaagagccgctgcgtatgacgacagggctttctttggaggataacggcaatgtgtcatttcaagtgtacagcaatgaaaacgattcagacatttattgtgaaggcagtgctgtgattgagccgctgtctgaggcgccggttttgcatattgaacagctgaaagcgcgatgccgcaaaaaagtgctgtcaaaagaagactgctatgcggcgtttgcaaaggcggaaattgtatacggaccttcacatcaaggaattgatcacatttattgcggggagaaagaagccttggctaaattggtgctccctgcttccgtttctgatgaggctgaacagtttgtgctccatccgagtctgattgattctgcttttcaggcggccatcggcgttatgaatgaagatcaagcgggttatcctgagcagccgttaatgccttttgaattgcatgaactgaccgtttttcatacgtgcggtccaaacatgtgggcggccgtatttgtgacgcatgaaacaccggccgtacgaagaatggacattgatatatgtgatgaacgcggcaatgtgtgtgtaaggataaaaggattttctgcccggatggccgaaagtgcgccggctgtaaccgataataagcaatacgatctgacgggtaaccttaccggagccgtcaaactgatgcaggtatgggacgcggaaccgatagacaaccaaaccggcttccccatttctgaagcaaaagctgtcatcatgggcggtacagacgggcaggcggacgcggttttacgattgtttcctaaagctgtgcgatttgatatcggccaaagtgcttccgttgaagtgatatctgatcggctccgccgtctcggtgagattcagcatatgatctggtttgcccctcagccggctgattctgacagccatgatcaaaaaagcggggtgctgcaaattttcagagcggccaaagctcttatcggtctcgggtatggaaaagagcagctagggatgacggtgattacgcaccaagcacagcctatcacccaatatgatgaggtgcgtcccgctcattccagtgtgcacggtttcgtcgggtctctcgcaaaagaacatccgagctggcacatccgtctggccgatcttgaagacgggggggatttccccgcagaagacatattcagcctgccccgcgaccgtacgggtaaagcgtgggtgcgcagacatcaggaatggtaccggcctcaattgcttccggtccaaagcgggccgtctgaaagtgttccttaccgctatggaggcgtatatgtcatcatcggcggtgcgggaggcatcggcgaggtttggacagattatatggtgacgacgtataaagcccgagtcgtctggatcgggaggaggccgctggacagccggatacaccaaaaaatagaccggtaccggtcatcaggcccggctcccgaatatatagccgcagatgcttctgatcttccatcgcttcagcgcgcctatgaacacattaaaaacacatacggcaccatcagcggcgtcgttcattcagcgatggtatttgcgaatgaaagcgtaaaagatatggaagaatcacagtttcatgccggccttgcggcgaaagtggatatttccgtcaacattgccgaagtatttgcgaaagagtctttggactttattctctttttctcttcggttatttcatatattaagaatccgaaccaaagtcattatgcggcggggtgcgcatttaaagacgcatttgcccatgagctttccggacggctgtcatgccgggtcaaagtgatgaactggggttattgggagcgggctgacaatcacatttctgaagagtttgacagactgagtgcaatcggtctcgggctgatcagccgggcggaagggatgcaggcgctggaaactctgctgacgcagccgatctcccgtatggggctgatgaagctgaccaagccgattccgatcgagggaatgaaccctcatgaatttgtgactatctgattgcctgtcaaaatgacggagcaaatttaattttcttaggaggataaggttttgggtaagggagacaaacaaaaagaccgtacacagttatccttaagaacagaaataagcaatcaaatgaaagaattgaatcggcttttgctgcaagtgctgcgggtgacgctgcgttcaatgggtctgaccggcgaagcgccggcggcttcctgtctgcctttatatgagcgctggctggaagaaagcatccgtcttttagacagcgattttaaaagcgatgaaacggccgcggtttgggaagagtggcataagaagaaaaacgaatggctgaaagatccggatatgaaagcgcaggctctgctggcggataccgtcattcaagctttgcctgacattttaacaggcaaaataaaagccactgacgtgatgtttcccgattcctcaatggagcttgttgaaggaatctataagcataatattctcgctgattattacaacgatgtgctggcaaatgaagcgtgtatgtatgtggaaaatgtaattaaaaacaatcctgaggcaaacatccgtctgctggagatcggagcgggcaccggcggaacgagcagcacactgtttaaaaagctccgcccctatcaaaaccatattcaggaatactgttataccgacttgtcaaaagcttttttaatgcatgccgaaaaggaatacggcgcggacaatccgtatttgacgtatcagctgtttaatgtggagcagcctgtggcgggccagggattacatctgagaacctacaatatcgctattgccgcaaacgtgctgcatgccaccaaaaatatccggaaaaccttaaggacggcaaaagccgtattgaaaaaggacggtttgctgcttgttaatgaactgggcgggcatacgccatttacacatgttacattcggcttattagagggctggtggctgtacgaagacgaggcgctgcggattccggggtgccctggtctttatccggaaacatggaaatccgttttaatggctgaaggctttcattccattcaatttccggctgaaaacgaacgtctgcacactcagcagattatcacggcgaaaagcaacggagtcatcaggcagagcagggaagcttacaccgcgcaaaagcgccaatcaaacgtaccgcaaacatcctctgatcgtcagctccccatcaaacaagcgggagaagggctttcggaaaagacagcggcttttctgataagggctgcggcaaaagtattaaaaatgccggcagaagagataaatccgctggctcctctggatgaatacggcattgactctattcttatcgttcagctgacgaatgagctgcgggatctcgtccctgatatcagcagcacgctgttttttgaataccggacgatagaagagcttgccgcatacttggctgaaacgaaggagcgcgaactgcatgcgcgattttctgaagaagtccgtcatactgaagcggcatcatccggctctttgcttgaaaaaagcacagagtacctgaaacagatcgtcagcgccatcttaaagatgccgattgaggacgttcaagcccatacgccccttgaagaatacggaatcgattccatcttaatcgtacagctgaccaaccgcgtgcgggaagacgtacctgatatcagcagcacattgttcttcgagtatccgacaatcggcggattagcggaatatctcgtcagctcaagacaggatgatatggccgggattttcaagacaaataaagaagccgaaaaggcgccgcacacattacagaaaaagcaaagccgcaaaaaaagcgccggattgacggagcgccaagcggcatctttttctgaaaaaacgccgcccgcttccgaaccgccgtcaaaacaccttgaagtggcaattgtcggtcttgccggacggtaccccggagctgaaaatgttaatgagttctgggaacggttaaagaccggtgaacacggaatcaccgaaattccgaaagaccgctgggattggcgggactactatgatgagacaaaaggtaaggaaggccggatgtatacgaagtggggcggctttttaacagatattgataaatttgatccgctgttttttaaaatctccccgaaagaagcggagcgcatggacccgcaggagagactgtttctggaaaccgcttatgcggcccttgaggatgccggatatacccctgattcactatgcgccggtaaaaaggttggtgtctttgcgggtgtcatgaacggcaactatccgacaggggctcactaccactttatcccgaaccgcgtatcctatgtgtttgattttcacggtccgagcatcgcggtcgataccgcatgctcctcatccttaaccgccattcatctcgctgcagaaagcatcagaacaggtgcatctgaatgcgcaattgctggcggcgtaaacctgattacagacccggttcattatatcggactttcttctatgagaatgctgtcaccgtcaaacgcgtgcaaagcgttcggtgataaggctgacgggtttgttgacggagagggcgtcggctgtatcgtgttaaagccgttgaagaaggctgttgaagatcatgatcatatatacggtgtcattaaaggaagcgctctgaacgccggcggcaaaacgaacgggttcaccgttccgaatccgaatgcacaaggagaagtgatcgcagaggcgatggagcgggcaggtattgatccgagagcaatcagctatctggaagcccacggcaccggcacttccttgggagatccgattgaaatcgcagggttaaccaaggctttccgacgctatacggatgcaaagcaattttgttccatcggttctgttaaatccaatatcggacacctggaaagtgcggcgggcattgctgcggtcaccaaaattcttcttcagatgaaacacggatatctggtgccgtcgctgcattcaaagcagctgaacccggaaattgattttgaaacttctccttttatcgtgcagcaggacacagcggaatggagacggccggtcatagaatctgaaggagtaacacgggaatatccgagaatcgcgggtacatcttctttcggagcgggcggtgcaaatgcccacctgctgatagaagagtatgaaccggctgaaatgagttcggcagacaccggccgtccggcgctttttgttttatcggcaaaagataaagaccgcttgcgcgagcgggctctgttgctggcggatgccgccggaaacggaacaattacagatgcgaacctgcttgacgcggcatttacccttcaagtcggcagggtcccgatggaagaacggctggcgatggcagcggactctgtttctaaattggaacagaagctgactgcttttctgaataatgctggttctgtaagcggggtgtttacaggacggggtgatagtgctgtcacggagacggaaggcacagtcagtgattggacggaaaaacgtcaatttgacagtcttttgaatgcctgggttcacgggacgcccgtcgattgggcatctttatataaaggggcgctgccgcatcgtatcagtctgccgtcttatccatttgcaaaagaaagctactggatgaagcgggaagaaccaaaaacaggaacaactgaatatgtgcatcctttcctgcatgaaaatacatcaaccttggcggagcaaagctatcatacatcttttacaggccgggaacatgttttccagaatgtgagaggggagcgggttctgtcggcagccgtttatttagaaatggcgcttgcggcttatcatcatgcggcagccagctctgaagaaaaagagatatggatccgaacagcggcatggactgacccgattaccggcggacatcacggtacgggcgtcaatctctcccttctgtctgaagacgaggaaggcatccattatgaaatatacagtgacgaagagaagctgcatcattatggaatcatcggacaagggaacatacagccatcccgcgtgctggatattgcctccttacaaaaagactgccgcccgctgtcattcgattatgaaacaccaggcacgtcaggtgtaacgatcagtaaggagttccgcaccgttgaaaagctttatgcgggagaaaatgcggtttgggcgaagcttgctcttatagatgaaagcggctgtaatccgggatatcatataccgccggaatttctggacgcagcttttcatgtcctggcaaaaacggagccgtcagtccatatcgtgcctgaagcggttgaagaactgcgcgtcatgcgtccgtgctcatccggcatttggatgtatattaataaaaagaatcaaaccggctgtgacattcaattttgtgacgaaaccggcactgtctgcgcagaaatcaaagggataagaatgagacagtggtctcagcaggatcacgggcaagaggaacaatccgagatgatgatatttgaagaaatgtggacgcagcagcctttgaagaaatccattcatgaagagctgaaaacggtcatctgttttcttacgggagaagctgccagaaagcatgcttatcagtctttacaatccctttatccgggagccggcgtgttttttatttcacagggtgaggaaactcaaaagctttcaaacacgcattatcaaattaaaatcactgacggacaagcatatcaagaaacgtttcggcatattgaaacggctgcaggcaaagcggatgccattttgtatggatggccgcttgaagatgaaaaggccgtgaaagactattccattctgtatcatgtgatccgcgaagctgcttctttgcgttctaaaccgaggcgaatctttctttccgctcagtgcgggatcgataccgatatcagttacgccgagtcatggatcgggctggaacggtcgctgaaactgatcttgccggagacggatacggccgcggtttattttggacaaaaaggaccgttagaaaaactgattcataacgtatgtgaagaacttcacagcgagtcgttccgcagtgtcatgtacagtggggaaatccgtcacgtcatggaaatgaagcagacggatattgcccctgttgagaagcgtgtgataaaaagcgggaaaacgtacttgattaccggcggatgcgggggattaggcttgttatttgccggatattttgctgaaaaaggaccggttacgctcattttgacggggagatcagcggcaggcggcccggtgctgaacaagataaagagattggaagaatcaggcaccaaggtgttttacgtgcaggcggatgccgcagatcaggctcagatggagaaaggtttgcaagaagcgaaagagaaaggatgcgggccgattcacggtgtcattcacgctgcaggtcttcaaggcactgaaagcattctggagaaagatctgcaaacctttcagcaagtcttatcgccaaaagcggacggcaccgcagtgttagatcaggttctgtcacgggagccgcttgacttcttctgttgtttctcttcttcttcagcgattttaggagacttcggttcttgtgactacgcaatggggaaccgcttccaaatggcttttgtccgtcaccgggataaacttgtgagcctcggactcagaagcggcaagtcacttgcaatcaattggccgctttggaaagaaggggggatgcatgtcggcacggcggaaagcaccgatatgtatttaaaatcaagcggacagcgttatttatacacagaggaaggactcgacgcttttgaaacattgttagtccagccgtccagccagtatctcgtcctggccggttttccgtcgagggccaaacgcttcctgcagatagatcaaggcgaacggccgatttcgggttctgtaaacaggaacgtcccattttcaggaaggcggagtgaaatgaaaggctttacactggaagaatgcgtaagctgggatgtgaaagaactggcggcggggcttttgaaaatagacaagaacagactgacggccgctgacaatctggctgatttcggctttgattctatcagtttggcggaattcgcctcttctttgtccgctcattacggaattgaagtgacaccggccctgtttttcggacattccacactggagaaggtcgtccgctattttctgacggaacacaagtccgtcatggagcatgtctatgaagaaaagaaacctgaatccgcagatcaatctgtctttgaaaagacaggaacggaaaagcgaaagaagcagaggggaagaaataagctgaacgccggaaccgagggcagtcaggcagctgattccattgccattatcggcatgagcggccgatttcctcaggcgcgcacggcggacgagctgtgggacattctgtttcaggaaaaggatgttgtcgcaccggtcgcaaaaaaaggtttcacaagttcaaaatggaaactcggcgctgtaccgggggcggacgaattcgaccctttattttttgaaatatcgccgagggaagctgaaacgatggatccgaaacagcggctgcttcttcaggaagcgtggagggcccttgaggacgccggctacggcgccagtcacatcaggcagcagacgatcggtatgtttgtgggggcggaagaaggagattatcaccttttaacacgggacaaaggcaatgtcacgtctcatcataacggtattttggcggcgcggctggcttatcacttgaatttatcaggtcctgtgatggcgataaatacagcatgttcttcgggactcgtttctgtccatcaggcggtattaagcctgcagaataaagagtgcaccacagctgttgcggccggggtgaatatcatgaataccccggacttttttgaaacgatagataaagccggaatgctgtcggaaaacgggaaatgcttcgcgtttgataaaagggctgacggcatggttccgggggaagcggccgcggcggttgttctgaagccgctgagagaggcggaagcggatggtgatccgatttacggggtgattcgggcgagcggcatcaattatgatgggaaaacaaacggaattaccgctccgagcggcgtcgcgcagacccggctgcttacttccgtttatgaccggggccgtatcaaccctgaagatatcgaatatatcgtcacacacggcacaggtacaaaactcggtgatccggtggaaattaacgcgctttatgacgcattttctgcctatacaaacgaagaagcattttgcgcgctcacatcaattaaaaccaatatcggccacacgtttgccgcatcaggcattgtcagtttgatcagtcttttacaggcgttctcccgtgaaatgattcccgccagtctgcattgcagcggggaaaaccgctatatcaactgggagaagagtcctttttatgtgaataaaacgggtaaaccgtggccttctctgccgggtaaaaaccgaatgggggcagtcagcgcattcgggatgagcggaacaaacgcccatgtcgttatggaaagctataagcgcagcgcttcatctcatcgtgatgcccctgcatatttacttactttgtctgcaaaaacagaggaggctcttcacgaaaaaatcgaagatatgatcacttgggcggaaaacggcggactgaaagaaaatgatctggcccagctcagctatacgttgttaaaaggacggcatcactttaaccatcgcgccgccatcgtagtgcaagatgctgatgacgcagtgtatgtatggaagcaggcaaagcttaatgaacatcatccttatgtgttttcgggaaaagtaccgcagcactttgcaggccgtcagcatattcaggagcacataatagaagtgctcggcaagtgcagcgcctcatattctgaccatagaaagtatcaggagctgttatgcgtgctggcagatttttattgtcaaggttatgaaatcgaaggggacttgctttatggcggacctttgccgcgaatcggcaatctgccgggctacccgtttgccagacagatgtattgggcgtccgatcgtcttcagagagagcttgaaagccggaattcagctgaacgtgaaaagcttcacccgctgcttcacgcgaatacatcgacttttaccgcccagcgctttacttctgttttttcagggcatgaaccgttttttgccgatcatatcgtcaatggaaaaccggtgcttccgggcgcagctgctttagaaatggcccgggccgccgttacgcttgccgctgaagacctgccgggcgggaaagaggttgtccgactcaaacagatcgtttggctccgtccggtgacggcgctttctgaaggagtgacgcttcatgtgaagcttcagccggaagaaaacgaagacatcgcttttgaagcgtatgccgaaggagaagagccgcttgtctttttccagggaaaggccgtgctcgaagagacggaacgtgctcctgttctcgatgtggaagcggttcaggcgcgctgcggcggtcgtcacttgtcaaaggctgagtgctatgaagcattcgacagcctcggcatcacctacggaccgtctcatcaggcgcttgacgccgtctatgccggaagcggagaagtgctcgcaaagctcactcttccgccgtccgcccgcgaagaaaaggaggcgttcatcctgcatccaagcatgctggacgccgcccttcaggcttctatcggtctcgtgctctcagacggttccgcgtccggacggccgtttctgccgtttgccctccaggatatgcaggtgttttctgcgtgccgggagacgatgtgggcggtgctttcctcagcagacggcgcctatcatattgagctgtgtgatgaaaacggcgaggtatgtgtccgattgacggggctcaccgcccgttttctggaagaggaaacggaggaaaaaccgctcttgcttcagccaaagtggcaggaatcaccgccggatgaaggcggcggacaagaagagtctttcagatacgtgacgctgtatggcggaatgaatgctgaggacataagcggcgccgtatgtgcggctgacggcgaaggtccgattgaagagcgttatgacgcctgcgcggcggagctgtcagcgatcgtcacgcgtcttatcaaagaaaaacagaagaaaaaaacgctgatccagcttcttgtccccgacaggggggaagacaatgtattggcggggctggccgctttcctgaaaacggctcaccttgaacatccgaagctgtacggccaagtcatccaagccgatccggacgagtcagcatcatcgcttcttgccaagctgaaagaaaaccgggcgcatcctgaacaagcggaaatccgttatgaagacggcaaacgtctcgtcagaaactggcgtcatctgccggcctctcaaagcggcgccgttccgtggaaagacgaaggggtctacctcctcaccgggggagcgggcggcatcggcctgattttcgctgaagaaatagcctcccgcgtcaaaaacgccgtcctcgtattaacggggagggcagaagtgcttgatgaagagcgctccgcccgcttacggcgcttggaagcgtcaggcgcccgcgtattgtatcaaccggttgacgtgacagacagggcggcggtcatcgccctcgtccgcggcatacaggaggagcacggaacactcgacgggatcattcacggcgcaggcgtgatcgctgacaactacattctgaaccagacagaaaacgaacggaagaccgtcatggcgccgaaagtgaaagggcttatcaatcttgatgaagcagcgaaagatgtgcggctggactttttcatcctgttttcttccttggcgggaggcatgggaaatccggggcaggccggttatgcggcagccaacgcatttatggatgtttatgcagcccgccggaaccgtctcgtgcgggacaacgagcggagcgggcagaccctgtctgtcaactggccgctttgggaagaaggaggtatgcgcgtggacaaagagaccgaactgctgatgtatgaacagaccggaataaaagccatgcgatcggcctcaggcatccaggcgctttacgccgcttttgcctccggtggccaccaggtcatggtggcagaaggagacgaaaagcggattcgcagccatattttcgacctgcgtgaagaacaaagcgccgccggacaggctccggcagtggcagatgcaagagatctgaaagatcgggttcaagagaaactaaagcggcatgtatcagatcttttaaaggtaagcatgaaagatattgaggctgacagcgaactgacggaatacggatttgattcgatcattttcactgaatttacaaatctattaaatcggtcttatcagcttgagctcagcccgactatcttctttgaatttccgacattgcgcaaactgagcggccatttgatatctgaatggaaagaagcattcagcggcttagaaagagagagtttaaaaaccgctccaaaagccgggataagaaaagctgaaactccggcggccgttcatgtcaagcgggaaacgcccgtatccgtaaaagaaaaatcagaagaaaaaaccgaaccgatagccattatcggaatcagcggtatttttccgcaggcgaaagacatagatgaattctggacacgtttacaaaaaggggagcattgcatcacagaaattccccgagatcgctgggattggcgcgaatattacggcgatccggcggcggacgcaaataaaacgtcaattaaatggggcggttttatagatggtatcgccgggtttgacccgctgtttttcgggatatctccgaaagaagctgaaatgatggatcctcagcagcgtctattaatgatgtatgtgtggaaagccattgaagacgcggggtactcagcaaaacggattgccggaacaaaaaccggtattttcaccggcacattgggaagcgggtatcaaactttaatcaataaggcgggtcttcctgtcgaggggtacacgatgaccggaatcgtgccgtccgtcgggccgaaccggatgagttattttcttgatattcacgggccgagcgagccggtagaaaccgcttgttcaagctctttagtcgccattcaccgcgcggtaaaagccattgaaacgggagattgtgatatggcggtcgcagggggcgtcaacacgatcgtcacgcctgaagggcatatcggttttcaaaaagcaggcatgcttagtgaagacgggcgctgcaaaacattttccgatcaggctgacggttatgtcagaggagagggtgccggcatgattgtcttgaaaaagctttcagaggctgagcgtgacagggatcacatctacggcctcatccgcggtacagcggaaaatcacggcggacgctcagcgtcacttaccgcgccgaatccgcaggctcagacggatgtgctgaaaagcgcttatcaaaaagccggtattcacccgtcaacgatcacttatatagaagcgcacggaacagggacggcactcggagatccgattgagatcaatgcattgaaaaaagctttccaaacagacggggctccgggcggatattgcgggataggctcagtgaagacaaatatcggacatttggagctcgcagcaggtattgcgggcgttatcaaagtattgatgcagctgaaacatcggacgctcgccaaaagtctgcattgcgagaacatcaatccccatatcaaattgaaggacagcccgttttacattgtgacagaaacaaaggagtgggaagcgctgcgtgatgaaaacggccgggtcctgccccgccgggcgggtgtaagctcattcggtttcggaggtgtcaatgcgcatatcgttattgaagaatacatgggaaaaagtgagacggaacagcaggaagcccgtgagaaagcgtcatctctttttgttttgtcggctaaaaatgaagagcggctgaaagaaagagcgcgtctccttcgcgattttatccaaaacggctcatcccgccatatcgatcttgcagatgccgcatacacactgcagaccggacgggatgcgatggaagcgaggctgggaatcatcgcaggctccgcagaggaactgactgaaaaactgaacgcgtttctgttgggaaaaaacagcgaagatatcatcagcggccgtaaaaaacgcgagaataacacgatctccatgttctcagacgatgaagacgctgctgacctcgtcagcgcctggcttgagaaaaagaaatacaggaaagtgctgcggctctgggcaaacggatttgacacggattgggagcagctgtatacggacagtaagccgcgccgcatcagcctgccctcttatccgttcagagcagaccgctattgggtgccgaaacgggagcagctgccgctttcgaatcaaaaaacagtagtattgcaaaaaacatgggaaccgtgcgaggcagtgtcttcatccgagccgttcaacagcaaaatagcgctcatcgtctccgaggatacaaaagaccttgccgccgaggtgaaaaaacagctgaatgatgctgacattgtgcaggaaaatcagctcatctctttcttacaggatccgaatgcggccatctattcggggtttattgacttcaccggctgcggctcccgacaaaagcggcaggacatcagctgggtggcatcgctgcagcagctgattgaatacggccgcggacaagaaaacataaaaatgctttatcttacaaaagggcttgaatccttcaaaaataaggctgccgctatgcatggtattgaaaaagcggggctttatcgcatgctgcggcatgaatacagccatattctcacctgtcacgccgatattgatcctgaagagccgctggagcagacagccgcttttattaaacaagaaattgaatcagacttaacggaatctgctgtttgctgcagggacggcatgcgcttcagctatgttcttcggcagactgatcagattgaaccagaagccgtgcaaacagaccggactgtgtttccaaaagacgccgtcctgatgataaccggaggaacgcgcggactcggcgctttatgcgccaagcatttcgtttccgcatacggggtgaagaaactgcttttgacaggcagaaaggagctgccgccgaaaaccgagtgggatcttgagcaaacagaccctgtcgtttcggaaaaaatacagcttatccggcagctggaatcacaaggcgtaaaagtgtgcgtctcagcagttgatctgacggataagcaggcagtcggacggcttataaaagaggtaacctcaacgctcggacctgtcggaggcattctgcattgcgcgggaattgcggaccgtgaaaaccctgcttttctccgcaaatccaaagacagtatcgcgcgggtgctcgccccgaaagcagacggccttcacagtctgtatgagagtgtaaaggatgatgcgccggcatttttcgtcctgttttcatctgtctcggcagccgtcccgattcttgcggcgggacagagcgattatgcgatggctaattcttatatggactattttgcagaaaacaatgagagcggcatcatcagcatacaatggccggcatgggatgagacgggcatgagcagggatataaaaagcgggatttatgagcaaacgggattgctgcggcactctgacgcggaaggtctcaagatgcttgattacattttaagagaaagacccggagctgtcgtgctgccggcacaagtgaaacatgattgggacatcaaagcgctggaaaacgccaagccagccgcccataaagaaatgagaacagcttccaaacctcctgaaacaaaaaaacgggaacataaccggatttatattcaatcttggctgaggtcgcttttggcaaaagagctgagtatcgatgaaacgcatatggatatcgatgtgccttttcaggaatacggaatggattcaatctttctggcgcaagtactgacaaagattgatcaaaaactgccgtccgtttcaattgatccgactgtccttctggaacaccctaccatagaacagctcgcggattatttagccgcacattgtccggaagctttttcggcagatgcagcggttcccgcggagaagttccctttgcagaagacgccgaaacggagcaaaaaaacggcagataagcccgggaaacggggaaaggttgcgatcatcggcatggcctgtcattttccgaaagcgggggatataaaagaattttggaagaatctccgcagcggaacggatgccgtcactgaagttccgccggacagatggaacgccggggaacactatcagccgggtgaatatcaagaaggaaaaagcatcagtaaatggggcggttttattcacgatattgatcaatttgacccggagtattttaatatttcagaaacgctggcaccgatgatagacccgctgcaaaggcagtggctcgaagtgagcgcggaagctttggccgatgccggttatcaaaaagaggatctctggggccgccgtatcggcgtttttgccggtgcaagggcaggtgcgtttcatcagaaatttcaatatttgcaaaaagacgcgattattggcgcggggcaaaattttattaccgcacatatggcgcacatttataactttacagggcccaacctggtcgtagatacggcctgctccagttcgctaacggcaattcatttggccgtgcaggctattcaaaatggagaagcggaagcggcctttgcgggcggggttgacattttgcttgatgaaaaaccttttctcacaatgagcgcggcgagaatcttatcgccaaacggccgttcaaaatctttcgatgccgatgcggacggaacaggaatcggagagggctgcggtgtgctgatgctgaagccgctcgaaaaagcgatagaagacgaagataaaatatacggcgttattgacggctctgcgattaataatgacggcagtacaatgggtgtgacgacaccgaatccccgggcgcagcaggacttgattgagcaggcggttcaatcagcggaaatcgagccggacaccatgacatacgtagagacgcacggaaccggtacattgatcggcgacccgattgaattaaaaggattaaccaatgtcttgtctgcttattctgatgaaaaacaattttgcggtgtaggaagcgtcaaaagcaatatcggccacttgctgagtgcggcgggcgcggcgggaatcatcaaagttttgctggcgattgccaatgaagaactgccgccgactttgcattgccataaaccgaacccccgctttcaatttaatgattcgccgctttatcctgtgcttgagctgaagcggtgggacggaaaaaaagagatactcagggccggggtcagcgcgttcggtttgggcgggaataatgcccatatcattgtcagcaacgaaggaataccgaaagagcgaaaagcggccatggaaccgaaaggcggccagacagtataccgaaaacagcggtattggcctgaaaaagcacagttgcccgaagcggaagaaaatgaggcgggcacagaagcaatgtttgaaataagcgaggtgtgatagattggcagttgccaccgatcaagtcaaaacgttcctgcagaaaatcagccatacgaattatatcgtccgggatcatcgcgttcatcaaatccgcgttctcccgggcgtgactttaatagatatgctgtatcggctcgccgccgggtacctcggtgaacggcctatagaattaagacagattatttttaagcagcctgttgtaacatctgaagagtttgataaacacctgtatgtgacctttacgccggcgcgtgacagctggaaagttgagatcactagcgaaaaagcaaaaaacggcacaccgcttggcggaaaccgggatgagaatatggaatgccagctttatttgcaagaagacacgccccgggcaaaagaactgaatattgaagcattcatgaaaaacgcaagccgaaaatgggacatgcatgacatttacggaattgcaagaagaagccatattgaacatggcgagtttatgaaaaatgaaggggccgtttatcagcttcaggataaagaagaattaatggagctcactctgagtgatttggctgaaggattccgggagaaattcaaggcgcatccggcttttttagatgcgtccacccttgccggctcttcctttgcattgtcggcccaaaagcagaatgacacaccttatattccttttatgatcaatcgtttttgcatacatcagccgtttccgaaaacgatttacacttattctgcgaaaaacagccgcactgaaagcggcgcatcagacagcgaacctgatgtttattcggccgacttcacgatttacgacagggcagggaacgtattggccgaatgtgagaaactgacagtaaaaagggtcagacaagcgaatatgattacccatctgatagacaaagagaagccgcctcagcagaacagaagcggccgtggagagcccgaaagtcctgtggccgcagaagacgtgcctgaacagcaaacgccggaacaaaacatggtgacttacataaagtcggaaatcgccaggctgatcaatcgtccggcacaggatattgatgtgcggaaaggcttttatgatatggggcttgactcggcgcatttgctgaagctcgtaaagatattagagcagacttttcagcagcagttttatccgacactgctttttgaatattcatctgtccgccgccttgcggattaccttatcaatgaagcgggctgtgtgctgaaagattcggacgaagaacggcatacatcagatgctgacatcgctgatgaggttctgttttttgaacccgtctggaaagatcatccgctggaaacggcggtgcagaacgggcaaaaacacacccgtcatctcattatcgctgccgatgcaggaccccgtctcaccggtgaactcggcgcacattgcccggaagcggaagtgatagaactgaaaagggagcatgagattgcagatgagcagtttgaagcagatgccgagcgcatatttcgtatgctcaaacgggaactgacagaccatccgaaagaacatacattgattcagcttgtatgcgccgttgagaatggagcggcattttcttccgctctcggggctatgctgaaaacggcacatctggaaaatccggctctttgcactcaggtgatcaccttctgtgacaagaatgagagattgccaagtgagacggccgcaatcattagaacagaagcagactgctcttatgcaggctgcacagacattcggtataaagacaatatgcggcagatcagattgttcgaacgtattgagaaactggacgggcagacacagtctccttggaaacaaaacggcgtatatgtcattacaggaggcctcggcggtcttggatttctgcttgcccgtcaccttgcagaaaaagaaaaggtgaagctcgcactcatcggccgttcgccggaacaatctgagaagatcagcagactgaaagcattgggcgcagaagttctttacgttcaagcggacatcggcaataaagccgaaacagagcgggcatttgctcagattagagaaactttcggccggctgacgggcatttttcattgcgccggtgttttaaaagatcaatttatcatccaaaaagacagttctgacttgaagcaggtgttcctgccgaaaatcagcggcctgattcatgcggacgaagcttcacggcatgaaccgcttgaatttttcgccgttttttcctcattctcggcgttggccggaaatgcgggccagacagattatgccgcagcgaacgcttttatggatgaatatatgaaatatcgcgattgcaaagcggaaaaaggcgaacggaacggggcttctatgacgatcaactggccgctttgggaagatggcggcatgcaggttgacagcttgatgaaagagatcatgaatgatgcaacaggcaccagcccgcttccggccggggaagggatggcttcacttgaatatatgctgcgtctcggcaagctgcaatccgttattttatacgggaatgagccggctgtaactgaaagcatgggccgattgggtccggtggcagacaagaaccgctcttcattatccaacgcagctgtcaagagaagaagccgaaaacaagagaggcatacagaagagcacgatattgccgtaatcggattggcgggaagatacccgcaggcgggaagcattgatgaattttaccaaaatctgcgctcaggtaaagactgcatcacaacaatgccgaaagacagatggaaaggttattctttctcatatgaagcagatcagttctaccgttacggaggatttttagatcgtatagacagctttgatccgctgtttttcaatctgactccgcgccaagctgaaatgatggacccgcaggcgcggctgtttttagagacggcttgggaagcttgtgaagatgccggtttttatcaggacagaacggcgcgcgggccatcttcacaaaagagaaaacgcgtcggggtattcgcaggtgtgttttggagccattatgagctgttcggcgctgaaattacacagcggggcacaccgctgtctatgggcgtgacgcctgcctctgttccgaatatcgtgtctcactgcctgaactttacagggccgtcaatggctgttgatacgatgtgctcttcttcgctcacatccatacatttggcatgtgaaagcattaaaaggggggagtgcgaatttgccattgccggcggggtgaatgcggtcacacacccgcataaatatgcgtttttggcgaatgccggatttctgtcttcagaaggcgtctgcaaaagcttcgccgacggcggtgacggctatgtaccgggagaaggcgtcggcgcggtgttactgacaaccgttcaagaagcagaaagaatgggctgtccgatatatggcgtcataaaaggctccgctttaaaccatgtcggaaaaacatccggtttgacagtgcctgatccggcatcacaggcggaagtcattacagattcctttcagagtgccggcattgatccggagacactgagctatattgaagcccacggaacaggcacgtctctgggtgatccgattgaaattgaagggctgagccgcgcattccgcaaatggacaaacaagaagcggttttgcgccattggctctgctaaatcaaatatcggccatttagaaggagccgccggaatcgccggattaacaaaggtgcttttgcagctgaagcatggagaaatctttccgtcattgcacacggacacgctgaatccccatattccgtttccggacacgccgttttatgtggcggaccggctggaagaatgggaacggccgtcacattctgaccagccgagaagagcgggtttaagttcttttggcgccagcgggagcaatgcccattttgtcatagaagaatatctgccgccgcaggctgaaaagaaatcggtaaatatacgggaagacgagccggttctgtttctgctttcggcaaaaaatgaagaacgcctattagaatatgtcaaacggtatgaccgctttttacgggaaaaagaagtcacccttaaagacctggcctacacgcttcaagctggcagagaagcgatgcctgaacggctggcattgatcgttacatccgtttgcggcctgcaagcgaaactgaaggatgtgcttgaacggaaaacagaaattgaaggatgtttccgcggacgtgctcaagatgatatttcatcagcaggaatggccgggctgctgaaaaacaagcaatattccagattgctcaatgagtgggcaaaaggagccgccgttgactggagcctgttatacgaaggagagaagccgaaacgggtcagccttcctgtatatccgttcgcgaaggagcggtattgggtgcctgtgcccgcggatatccggaaacagacagacgaaccggcggaaaaccaaaagatcattcttcaaaaagactggaagcagcaagatccggcggaatctgaagcattatcaggaacagtaatgatacttgcaactgataagacgagccgattggccgatgctctttttaaaggaaacggccatattgaaacgatctgcttcatccatcaggcaaaagacggcgccgattattacgccgccgcatcggggcgaaacctttacggcagagtgcgggagtctcttcaaaacaaacagatactcggggtcgtcgacataaccgcatatgacgcggaatatgaacggcaggaagagatagaacacggaaagcttgcctttttacagcaggctcttgagtcattccgtcatagcggcgctgtgttcagccaagtgacacaccgcctccagcctttcaaggaaagtaaacctctgatgcaaggggcgaaaatggcggggctgtaccggatgctgggcgctgagtatgccaacattcattcttttacgatagatagcgattgtgagattgagcatacagaagaattaagcagacagattgagactgaatttttacagccgcgggccaaaagcgtcagtgaatgctgctacaggctgaatcgccgttatgtgccgtttctgaagcagggtatgaatgtttcggcggcgcctgagctttcctattcgtctgatgatgtgctgttaataacgggcggatcgcgcgggatcggcgcaattgcggcggagcatgccgtttcacgcggatgcaggaaactggtcatcatggggcgggagccgcttcccgattcctcaaagtgggcagacatgaaaaaggacggcattctcccggaaaaagccgagcggatgcagaggttagccgagcggggcgcggagatccgctattacagcgtttctcttacggatcaaaaggggctccggaaaatgacggacagcatccgcggcacaatgggatcgattaccggcgtttttcattgcgcgggttcaatgggagaacaccccgctttttataacaaaaccgaaactgaaatcgaaagcgtttgcacgccgaaagtaacagggcttcgcggtctctatgaagctgttcagaatgagccgctgtcgttttttattttgttctcatccgtttcgggcctgatcccttcgcttgctgcggggcaaagtgactacgcgatggctaattcgtttatggactcttttgcaaatcatcaagcaggtaaaggaaacgtgtttgttaaagccgttcaatggcccgtctggaaagaaaccggcatggctgaaggcctgccggaaacacctgcttatcaaaaatcaggactttccaggttgtctgccaaagacggactgaagtttttagattacatcattttaaacggacaaagctgcggaattccttgtgttccagaagacagtgaggctgattttggtgatcttctgaaggtgaagaaatctgaagctcccgtgaaaaaaagcactgccggtgaccaaaaggtgaaggatatgattcgtaaatgggtgcgcaccgtcttcagtgaagaactgaaaatgacggatgagcagataaaagatgatatgccgtttgatgaatacgggattgactcaatactctttgcggaattggttcaatcattgcaaaaacggatcagcataaagttaacaccgtccttaatgcttcaatatcaaacgattacagagatggttgactatttcgcagcgcatcatgaagccgattttgtgacaaaagaaaatggtttcgttcaagacagggacgtccagcctgatttaaccgccgccgctgaagagagaacatccataaagccgaaagcggataccgaagacgatattgccgtcgtcggtatgtcctgccgttttccgggggcgggaggaacggatgctttttgggagctgctgatgaaaggaaacaccgccattcggcctgtccccgcatcgcgctggcatgcaacagcaaatgcaaaggattatgcggggtggattgatgatatcgacatgtttgatgctggctttttcggcatctctgaaaaagacgcggcaattatggacccgcaggcgcggatcatattagaagaagcagttcattcagtaaatgatgccgggtacggccaaaaggatttatcgggccggaaagtcggcgtgtacatcggcggcagggcgcagccttcagtcggtatggaacatatcctgcaggcgcctaacccgattttgggggcggggcaaaactatttggcggccaacatttcacgatttttgaatgtcacaggaccgagccttgtcgtggatacagcatgttcctcagggctgatcgggctgtcctttgcaaaagacgcccttttggccggaagaattgacgcggccttagtcggttcggtgagtctgctcttatctccgtccgcgcaccggttattcggagcacgccatattttaaatgagaacggagtgtttcatatattcgaccgtgaatcagcgggagaagtgctcggagaaggagcgggggcggtttttatcaaacgattgagcgatgcggtgcgggacggagaccgtatttacggcgtcataaaagccgtctcggtaaacaatgacggccggacgctcggtcccggttcaccgaatataagagcgcagagagacgccattcaaactgcgcttgacatggcggaaaagtcgcccgaagacattggatatatagaagtgaacggaggcggttccccaatcgttgattcggtggaaatcaaggcgctctcagatgtctatcagctgaaccggaaagcgcttctgccctgccggatcggatcggtgaaaccgaatgtagggcatttgcttctgtcttcaggtcttgcgggcttcatccgatgtgtgctgagcgtctatcataagcggattccgcctttcttatcagcgcgtgagccatttgaacattatgactttgaagcgtcgcgtattcattttaatcgtgaacccgttgattggcattcagagaagaaaccccgcgtcgcagctcagagttcatttcctgacggcgggacaaatgctcatatcctcgttgaagaatacagaggtgaaaggcagcgggaacatcaccgggcgcctcagccgccggaattcagaaaaaaacactacccccttttgggcggctggaacagcacggagaatgaagcggaaaaaacaagtaatgaaaaaacggacattgcggatcttttaaagaaatatgagaaaaaagcagagacaagcactgcacctgcggactcgttttggcaggtgacaacgtgacgtttttaaaaggggactaaccatgaaaaaaacagtgaatctgcgcctgacggcagaacatcccattatgaaaaaccatcttgttcacggcgaatctgtcatgcctggtctggcctatattgatatgctgtatcagctggcaaagcaaagccttgatctttcattccgttccatctgtctgaaacgggtgaccatttatcatcctttatcagtgaaacggtcagagcggcttgatgtgagtgtcatattcagtaaagaaaaggagttctggactgcctcgatttgcggggcggattccgggacggttttcttatcagcggaggtgcatgaaggggttttctcatcagataggcgccttgacgcagaggagaaaaaacaacaagccgcacttccatcagtctctttgcatacggtttacgaagacgcgagaagccgcggactgtcgcatgacgggctgatgaagccggagggagagatctatgcaaatgaaggggaatgtttccttgatattcggctgtctgattcatgccaggaaaatctccccggcgctctctttcatcccgcgctgatggacggtgccgccatggcctccggcgtattgcagacagctgcaggcgccggtttgtttttaccgatttattatgattcgtttattgccgctgagaccgttacggagcgctgttacgcggtgatttcgaaaaagtccggcacgccttctgaaatggtgaaaatggatattgacttttacaacctcagcggtgcgcatattgcttcactgctcggcctgacagccaaaaaggtgcggacagaccggcagctgataccaggcgttcagcagatggaggaaaccttataccgcattttctcaacatacgtaggccgtcctgtcacaagaaatgatgcgcacaccgtgttttttgaattaggccttgaatcgtcacagcttctggccattattaaagacatcgaagaggcgtttgatctgcggctgaatccgactcttttatttgaatgcagcagtatatccgagctgcttgaagacataaaaacaaaaggaacagatgaatcttccggccttgttgcgaatgcagcaccggtttctgaaacgcaatcaggcagtcagacatttactttctatgaacatgaagcatttcttcaggatcatctggttttcggcaaaccggcactgatgggtgtagtgtatccgtgtctggtgctagaagcatccggagcgcctcattccgacacgtatcccgccgggctgaaagatatccgttttacgggcgggcccgtcacgctagagccgggagaggccgcacagattgacatttcatttgcggcagaaaagagtgccgaacgctttaccgcaagctgcactgtctccggtaaagaaagccggaagacgtgtgccgaaggagaaataagcagaggtacagaggcacccgtaaaaaaatcatatgacgttgaacaaatgaagtcgcatgcacaaaaggtagcaccggatgttatttcaagtctgtacgattcggttgccgacttcacgataggcccgatgctgaaaacggtaacggcgggatacaaaatgagtgagagctcctatttattgcagctcgacctatcaggaaaaaaagaaaaaggcgatctgcgtcactttgcatttgacccgcttatattgaattcttgttatatgtcgctcggtgaagaagagttgcagctgaaaaagcggattcacatcccgctcatgattgagaggctgacgctttacggacctgtcatgtctgataccgtctatgtggtgaatacaatcaaacataaaaaagacgggtttctctcatttgatgccgcagtcctcagccataccggagaacagctggcggaattgaaaaacgcgtctgtgaaagaggtgcttcagccaaatcggcttgaaaatgcgtcttttgccccgtccgggaatcaaagccgtcagaaaacgaaaggaaacccgctggatattgccattgtcggaatttccggcaagtatccgcaggccgatgatatcaatgcgttttgggaaaatctcaaacaaggaaaggattgtattaccgaaattccgaaagaccgctggaaatgggaacattacttttccgaggaccgtacggcgccgggagcgatctacagtaaatggggcggattcattgacgggatcgccgattttgatcctgagttctttaagatttccccccgcgaagcggaacaccttgatcctcaggaacggctgtttttaatgcatgcgtggatggcgatggaggatgcgggatatacgaggacatcacctgaactgggccgtcaggtaggtgtgtatgccggtgtcatgtatcaggaatacccgctattcgcggctgaagcgggagtgaaaggacggcatatcgggctccccggcgggatttcatccattgctaaccgtgtctcctatttttgtgattttcaagggccgagcatttcggtcgatacgatgtgttcgggttctctgacttcattgtacatggcgtgccgggatctgcgggatcatcggattcgcgcggcgcttgccggcggagtgaatctcaccgttcatcctaacaagtacttcatgctgagccaggggcagttcatctcatctaaaggacactgcgggagtttcggcgccgggggtgacggctatattccggcagaaggagtcggggtgctgctacttaaacgtttagaagacgccgtacaagacggagatcggatttacggcgtcattaagggagctgccattaatcacggcggaagagcgagcggttacaccgtaccgaaccccaaggcgcagagcgaagtcatttctcaagctttacaggaagcgggggtatctccgggccagatcagctatgtggaagcgcacgggacagggacgaaattaggcgatccgattgaaatccgggctataaccgatgcattcggtgatgttcctgaaacatgtctcatcgggtctgtcaaatcaaatatcggtcatggggaatcagcagcaggcatcgccgctgtcacaaaagtgctgctgcagatgaagcacaaacaaatcgccccatctttgcatgcggatgttttaaatccgaatatccaatttgacgaagggccgttttccgtctgccgggaattaacagattggaaacggattgccgcagacggagaagaacagccgctcagggcggggatcagcagctttggtgcgggcggttctaacgcgcatatcattattgaagaatatgaggctcctgtcaaacaagcaatcagcagccaagagccggctgtcattctgctgtctgcgaaaaatggggagcgtctgacagaatatgcggagcgccttcttgcttttcttcaaaagaagcatacggataagccggacttatttgatgtcgcgtacactttacaagcggggcgggaagcgatggatgagcggctggctctcattgcggactcccttaaggagctggaggacaagctcagatcgtacttggaaaatgaaaacgcaccgcatctttacagggggcgggcgaagcgaaatcatgagacagttgctgtgtttgaatctgatgaagatttgcaggaagccatggtcaaatggctgaaaaagagaaagtacggtcatttgctgaacatgtgggtgcagggagtcgatgtggactggaacttgttatattcgggacaaaaaccccggagaatcagccttcccgcctatccgtttgcaaaggtcagatgctggattcaagatgaagccgaggcggtttcaaaaagggatgacggcaaaacggtgatccatccgctgcttcatgaaaacacatccgatctgtgggagctgaaattcacatccgtttttaccggacgggaattctttttcactgaccacacagtcaatggggagaaggtgctcccgggagccgccgtgatcgaaatggccagggcggccgttgagcgtgccgcatgcgctgtgccggacggacgtaaaggactgtatttgagagatctcatatggatgaggcctgtcgttcataaggggacggatgtagaagtccatatcagccttatccttaaggaaaatgaagacattgaatttacgatttacagcctatcggaagaacccgggggagaacggattttatacagtaaaggcaccgcggtatcaggagagatagcagaggttccgtcagttcacttagagggctggctgtccggctgcagccaatcggttatgacgtctgatgaggtttatcaggctttccggcatgcgggtatgatatacgggccgagccatcaaggaattgatcagctgatgatcggagagaggggcgctgcagcccggctgtcgctgccggaatcggcagacagtaccgccgatcagtttgtcatccacccgagtcttttagatgccgcgtttcaggcgtcactgggtgccggttcagatactgccggagacactccgatgctgccgttttccctgaggcaggcagaaatatttcagccgactcagaaaacgatgtgggcgcttgtccgcaaacagagtgatcggtcagataacggagcgctgacgctggatattgatttatgtgatgaaaacggcgctgtttgtatgagattaacaggattttcctgccgggcggtccggcagacaaaccaaaccgaaagcaaacggcaggaagtacagacggcgatgcttgcccctgtttgggacaaaactttcttttccctggaagaaaatcgagcggttgatcaggaacaattgctgatcatcggaaagccgggaaataccataaaggccgcggcaaaaatgtggccccgcgcccatctggcggagacgccggatcattcaagcgagcaaacattacgtgaattgacagccggatatcaggatatccgccatttcttatggattgcgccggatcgtttcgcacccgcatccgccagtcaggaaatgcttgatgagcaggagaatggggtgattcaatgtttccgtttcatcaaagcgctgctgtcactcggatatggaaaccgaaacatcagctttacggcggtcacccggcagacacagtgcgtgtatccgggggatctgccgcagcctgagcatgcaggcgtacacggtttgatcggttcattggcaaaagaatatccgaactgggacatcaggctgattgatgcagaagaagacagtgattcgtctgaaatgaaagacatctggcgcctccctccagatccggacggaaatgctgccgcgtaccgtaacggagcttggcacaagcaaaaaacagtccgggtgctgacaagttctgctccgcgtatgtcgtacagagaaggcggcgtttatgctgtcatcggcggagcgggcggcatcggagaagcatggagcaaatacatgatcacccgttacaaggcacggatgatatggatcggcaggcggccgaaggatcaggagattcagagcaaaatagacaggctggcgctatcaggccccgcgccgcattatatacaggctgatgctcaagatgccgcagcgcttaaggctgccgtccgttccgtaagagagcaatacggcaatataacgggagtcatccattccgcgataacgcttgccgacaaaagtatggccaatatggatgaagcttctttcagaaacgctttttcagctaaggtgaatacgagcgtccgaatgatcgaagcttttaagggagaaccgcttgattttgtgctgtttttctcatccgttaattctttcacaaaaaatgccgggcaaagcaactatgcggcagggtgtacatttcaagacgcctttgcccgccatatcgcttcctttcttgattgtgaagcgaaagtcatgaattggggatattggggcagtctgggcgttgtatcagacccgtcttacagaaaacggatggaggcgtcagggatcggttctattgaacccgatgaagcaatggaggcgctggaagtcttactatcagaaccgttcagccaagcggcattcattaaagctgctccgcacggcttagccgcactgacggatcaagatgcaatatcggttgtatccggcccgaagccttcatttatggaaagcgtcaagcggcaaaatccggatcggaatgaacggcttgagactttaaaacgagaaatggagttgcgcatatgaacagccttctttgcaaactgctcttttaccaattacagtcaatcggctttttcagcgagcctgtcactacacctgcagcatccatgcggagcgccggcgtgatcggcacatacggcagatggctggaagaaagcctgaatctattaaaagaaaacggatatatcgcgtatgacggatacacgatcaccctcctcacggatcagcgtcaggacagccgcacagtctggaatgagtggaatgcccataaacgcctgcttcccaatggggagcttgcgcaagctgaattggccgaggcgacgataaaagcgatgccttccattttaaaaggagaacgtccggctacggatatcgtatttcccgattcatcaatgcggctcgttgaaggtgtttataagcataatcctgtcgcggatttttttaatgaagtgttagcagattccgcggccgcttacctgaaagcctatcttacagaacaccccgatgcccgcatcaggctgatagaagtaggggccgggacgggcggaacgagcgccatgctgtttacaaaactgcaaccattcgcaaaacagattgcggaatattgttatacggacgtttctaaagcttttttaatgcatgccgaacaggaatacggacctgatgtgccgtatttgacaacggccttgtttaatgcggaggagccttgcgaatcacaaaatatcaaaacgggtgtttacgatattgtcatcgccgccaatgtgcttcacgccactaaaaatatcggtttgacactgcgccgtctgaaagcgcttctgaaatacaacgggatgattctgataaacgaaatcagcgatcgttctgtttttacccatttaaccttcgggctgcttgacggctggtggtcctatgaggatgctgagcttcggattccgggaagtcccggcttatatccaaaatcgtgggagcgtgtgctgcattcggaaggatacagagcggtttgtttccctgctgaaacggctcatgatttaggtcagcagattatcgcagctgagagtgacggactcgtccggatgcaagggatcagagacggcagaaagccatacgccgccccggctgaagttttccgaaagcccgcacagcctgtttcccgcagccgcgccccagaggagcatcaagctgttaaggctgatggggaatcggtcgcttcccatgtccgctctgtcatcaaaacaagtattgctgatgtattaaaaatgaaagaagaggatattcaggaagaactgaatttctctgaatacggcattgattccattttggccgtcaatgtgattaacgagattaataagcgtttgaatcttacactgcagacaacgattttatttgattactatcatgtgaaactgctgaccggttatatctcggaagaatacgaaaccatcatagcctcttctctggagaccgaaagagcgaaaatccgcccggcgcttcaggaagaacggcctgctgaaaaacctctgcagacggaaagaaaggaaaacggttatcagaaaccgaaacaagaacgtatgccgccttctttcgcaaagtccgatgactcgggaatgttccgggttgtgattgaccgtccgggcggcattgaagatctgacgattgcccgcagtgaagtgcccgagacaaaagatgacgaggttcaaatagccgtccgcgccttttctttaaacttcggagacttgctttgtgtcagagggctgtacccgacgatgccgccttatccgttcactccgggatttgaagcaagcggcgtcgtgatcaagacagggaggcatgtaacatctgtcattccaggtgatgaagtgattgtcggcatgggagaggaatttggatctcaggcgaatctcatcacatgtaaagaacatcaagtctatcataaaccggcccggctgacctttgaagaagcatgcgctcttcccaccgtggcggtgacaatgatagacgccttccggaaagccggacttaaaaaaggcgaaaaaatattaattcagaccgcgacgggaggaacggggctgatcgcggtgcaaatggcccggcatatcggcgcggaaatatatgcaacggccggatcacagaaaaaaattgagtatttgcattcgctcggggtccacaataccatttgctatttagaagaagattttgaaacggaaatcatgcgaatgaccggcggccgtggggtggatgttgtcattaataccctggccggtgatgccatgcaaaaaggaatgaattgcctggcgccgggcggaagatatatcgaaattgccatgactgcgctgaaatccgctaaatcagtcgacttgtccgtccttcataacaatcaatcttttcacagcgtggatttgcggaagctgtcccttcaaaatccggatcaggtcaaggattatcaattggaactgcagcggctggcggaagagggcgtcattcagcctgtcatctcaaaaatcttttcctttgaagacataaaagaagcgtatcactgtctggatgaccgcggaaatatcgggaaaatcgtcatcagcgtttctgagccgtatcaaatgacgtaccgccccgaacaaaaggatccggccgatacagtaaaatcagcagctgtgttacctgaaaaagaaccgatcgcgattatcgggatgagcgggcggtttgctgaatcggagaatgtccatgagttttgggaacacttagccgccggacgggatctgattaaaaaagcagacagatgggatgtctctgacagccaatgccagtatggcagttttatagaggacattgaatgttttgaccccgttttctttcatatatcgggacgtgaagcgacctatatggaccctcagcagaggctgtttttggaagaatcttggaaagcgcttgaagatgcgggatatgcgggagactcggtaagaggccgggaatgcggcgtgtatgccggctcctgcggcggagattaccaggccatttttaaacagcaggggcccgcgcaagctttttggggcaatcataattccgtcactccggcaaggatcgcctatcaccttaatttacaaggtccggcgatcactgttgatacggcatgttccagttcgctgacagccattcatttggcatgtcaggggctctggacgaaagaaacggaaatggcggtggcgggcggggttttcattcaatccactcccgctttttatcagtcgtcaaataaggcgaatatgctgtcaccgaccggacgctgccatacgtttgatcaaagcgcggacgggttcgttccgggggaaggcgtgggagcggtggtgctgaaacgtcttagcgacgccgttagtgacggagaccatgtgtacggcgtcataaaaggctctgcaatgaatcaggacggcgctacaaacggaatcaccgcaccaagcgcgctttctcaagaacgattggaacggcatgtctatgacaattttcacattgatccggaaaccattcaaatggtggaagctcacggaacgggcactgcactgggcgacccgatcgaattcggcgccttaacgcgcgctttccgccgctatacggataaaaaaggatattgcgccatcggctctgtaaaaaccaatctcggacatgccgctgcggccgcggggatggccggactgtttaaaatcctgctgtcgctgaagcatcggcagattccggcttccctgcattttcatcaagccaatcaacatattcaatttgcggacagcccgttttttgtgaatgaaaagctgataccgtgggaacggaatccggatgcaccacgcagagccgccatcagttcattcggattcagcggaacaaatgcccatcttgtgattgaagaggcgccgcaaactgtgcgccggtcaccggcaaaaccggcctgcctcattcctttatctgcgcggacggagcgtcagctggaaattcaggcagaacgcctgctggattcactcagcaagaacaaagacagcgatctgggaaatataagttatacgctcctgctcggcagaaagcatctacatcaccggtttgcctgtatcgtaagcagtgcggacgaactgaagcgggtattatcggagtggcttgtaaaaagagagcttccgggtgtgtttgtgtccaatttgaaggatcagaagccggcagaagaagccggaatgaaaacattcggaatggaatgcattgaacagtgccgctcggcggcttcgcccgcacagtacagagaaagcctggcacatatcgctgaccttttttgcagagggtatgatcttccttttacacggctttttgacggagggcaatattataaaacgccgcttcctgcctacccgtttttaaaagaaaggtattgggcggctgatgtaaacagttctttaccaggtcaagccatgaaaaagtctgaaacgcaaaccgttctcccgtcttcgccgcagcctgaacatgaagggctgctttctctgactcctttaactgagatcgaaatgagagcgtttgaaccggagacattgcaaaaaccgatcgtgttacagcctttggatggtactgtttctgtccagcagccagaaaaagccgttttcgaagacaatagaacattgcttgaagaattgaggataagcctggcagatattttatttttgtcaccggaagatattgatgctgatgagcctttcatcgacatggggcttgactccattatcggggttgaatggatacaaacagtaaataaaacgcaccacactgagattactgccaataaggtgtatgaacacccgacgcttaaggagcttgcggaatatatagcggggcaaataaagaaacccgagtatgctgaagcggaggaaacagcggtacgtccgcaaatcccggaagcagaaaccccccttgccggcatcgctgacggcactttgcgcaaagagctcaaagaaagccttgcggacatcctgtttctgaagccggaagatattgatgagcatgaggcattcattgatatggggctggattctattatcggtgtggaatgggttcagtccattaataaagcctatcaagcgtctattacggcaaatctggtctatgaatatccgacaatcgcaacattagccgggtatctgaccggttctgtccaaaaagacactgaggaagtacatggggaacatacgaaacaaaacgatatatcagaagagacagatgatcaagaaccgcccgagctgatctgtcttaacccgggtggaaagggaagaccgattttctggtttcattcagcgctgggggcagtggagctgtaccagcctgttgccgaacggaccgggcgtcctttttacggaattcaggcaagagggtggatgacagaccgggaaccgatccgcggcattaaaaacatggccgagtattacgttaagctcatacgtaccgtgcagccccggggtccttacgatgtagggggctattcattagggggcatgctcgcttatgaagtcacacggcaattgcagctggctggagaaaccgttgagtcaatcgtcatgctcgactcctttgactcagcgggtgcgagggaaataaacattcctgatgaattatttgataaaaatatgatgctgcagacggtgaacatggctttatttgcaccgatctatcaacatccggaacgcatatctgaaaccttgattcatcgtgatgaactgaatgccgatcttcatgaagacatatttttagagcaattaatagcaaaagccaaacagcgggggttaacgaagacggacgcgttggtgaaaaatctgatcaggcagaatataaatgttcaggacgcttacgaaatcactgattacgaactcctgccgcttccggatccgaacggggtgacatgctattatttccgaaataaaaacggtattttcttgggtgagcttgatccgtattttacaatcagggctgatattttatccgctgattttgtcaactattggagccagtgggaagagcatatgacaaacatcgccatcatggatgtggcggtatccaaccatatgacgttattggctgaagacagcgcagccgaaacgatttctgaattttgcggcgttttatattcggcagacggaatgacagaacgcagcttcctgcagctgcaggaaaagatactgaatgtgcatggtgagatgctgaagcagcccgccaaaacaagaccgtaaattcacatatccgcccgccgggtttactcgtaagcttcggcgggtcatttcaaatcttgatcacatcttggaggaatgaaaatgaccagtttaacaaaaatcagacagcagcagccgtacaagtggtaccaaacgatgagagaaacctctcccgttcattacaatgaaaaggaagattgctgggaaatcttcaactatgatgaagtgaagcgggtgatttctgactacagtcatttttcttccgatcataaatacttaagtgcggacaaacaggaaaaaatgattcggcatattaacaaagacagccttttgaaaatggacccgcctgaacacaccgtcttcagaaaattggtcaatcagccattcatgccgaaatcggttgagactcttgcaccgcgtatagccgctatcgctgatgacctgcttcaggccgtccgttcaaaaggcaggatggacattattgaagattacgcatttccgcttccgattatcgtgatcgcagagcttctaggatttcctccgaaagacagagatatctttaaaagctgggtcgaccaaagccagaatgtaaaagatgaaaagaaaatgaatgaagtgcaaaagcagatgatcggatacttcatgcagtttattttacagcggagaaaacagccgcaaaatgatttaatcagccatttaatttcagctgatttagacggagagccgctgtcagacaagcaattaatcggtttttgcggcttgttgattgtcgcggggcacgtaacgacggaaaatgtgatcggaaattcatttctcagtctcaaggagttcccgcacattctgccccggctgcttgaaaataaggcgctccttcctgactttattgaggaagtcatccgcctcagaccttccattcagcgggtaacccgctacaccgcggttgagagcgagattggcggaaaaacgattccggccggagaaaaagtgtatgcgtggattggatcggcaaacagagatgaaaagaagtttgaaaatcccgatcagattgacttgggacgaaagccgaatcagcatctgtcattcggtcagggcagccattattgtttaggagcgccgctggcccggcttgaagcgaaaatcgcgctttcccacttttttgaacagatgcccgcatggcgttttactgaggatcaagagccgaatctggttccgagccctgtatttcacggcgttgacaggctgcttgttgagttttgaacggaaaaataaaagaggcttccacaggaagcctctttactctgggggcttggagaaatgaatgtaggaatcgaagcaatgaatgtgtttggcggaaccgcgtatgtagacgtcatggagcttgcggaacatcggaacttggataaaaaaaggtttgagaacctgctgatgaaagaaaaagtggtggcgcttccgtttgaagatccgattacgttcgccgtaaatgccgcaaaaccgattatcgactctctgtcagaagaggaacggaatcagattgaaatggtcatcacctgtacggaatccgggattgattttggcaaatccatcagtacatacgtccatgattatttgcagctgaagcggaattgccggttatttgaggtgaaacaggcctgctattctttaacggccgggtttcaaatgggcgtgaatttcatcttatcgcaaacatcgccgggagcgaaagcgctcatcatcggaacggatatttcccgctttttagtggctgaaggcggtgacgcgttgacggaggaatggtcctatgccgaaccgagtgcgggggcgggagctgtggcgcttttagtcagcagcacccctcatgtctttttgcttgatcaaggcgcaagcgggtattacgggtatgaagtcatggatacctgccgcccgattccggatagtgaagcgggggatgctgatctgtcgctcatgtcttatttggactgctgtgaaaaatcatttcaggaatacggaaagcgtgtgagcggggcggattataagaatacatttcaatacctttcttttcatactccgtttggcggaatggtaaaaggagcgcatcggacgatgatgagaaaattggcaaaggctaagccgcaagacattgaagcggattttcagcaacgcgtgctgcctgggattcaatactgtcagcgcgtcggcaacatcatgggggccaccgtatttttatctcttgccagcacgattgataacggctcttttgaaacgccgaaacgcgtcggctgtttttcatacggttcgggctgctgctctgaattttacagcggtgtcgttatgccgcaaagccggacgcggcagaatcaatttcagatcagccggcatttggatgaacgcgtccgtttatcgatggctgattacgaccggctgctccaagacagcggcatcgtaaaattcggcacaagaaatgccgcgccagcagcagacatcccgaatgcgcatcaaggaaaaacacgattggtgctgactgaaataaaagagtttcacagaaagtatgaatggacgacctagtattagaaacactcggagccggcaaggcttgagtatttttaaagaaacggagaataaacatgaatccaatgattgatgtacaggaaacagaaccgggcattgtgcaggtcacaatgcaggatacggccgggaaaaacgggctgtcagaagagtttgtcagagagctgcaccgggtattccaagacatcaatgcccatccgtcctataaaaccgtccttctgacgggttacggaaattatttctgcacgggaggaacgcaggaggggcttttgaccattcagagcggaaagctccaatttacagatttaaagcttcatagtcttttattggattgcaggattcccgtgatttccgtcatgcaggggcatgcgatcggagccggctttacgatcggtctgagctcggatttcgtgattttaagcagagagagtttttattcttgtaattatatgaagtacggatttacaccgggaatgggcgcgacgtatattgtgcctgaaaaactgggaattgtcctcggggaagaaatgctgtttacggccgcgaatttcagcggcgccgctctggaaaaacggggagttccgtttgaagtgctgccgaaaaaagacgcccttcaaagaggccgcgaattagcccggctgctggcggataaaccgagagcctcactggttgcgctgaaaaccaatgtgaccgcacggatcaaaagagagctgacaaaagcggttgaggaagaggtgaacatgcacgaagccacattccatcttcctgaagtaaaagagagaatcagccgcttatacggcagttaaacagaatgaaaaaagcatgggaagccccatgctttatcactggtccgtcttttgcagaacggagcttgcgaattgttctttaatttcggcgctccgggctgcggtttctgcgatgcagtgcatgatggcttcttcaaagcggcgctcttctaatgcgcgaaggcctgcttcagtcgtgccgcccgggcttgtgatttccttgcgcaggcgttcaggccgtttgctgcttgttctgagcatttccgtcgcccctgccatggtttgtaaaatcagctcttttgccgtttcttccggcaggccggcttgaagggcggctttttccattgcttcgacataccggtacacataggcgggaccgcttccggcaatggctgtgacggcgtcaaggtgtttttcttcaaagcgcgtcgcttctccgattgtttccagaagctcttttgccgtccggatttcagcttcactcgcctcggagcttgcggaaaaaccggtcgccgattgctgaatggccgcggatgtattcggcatcgcccggatgatggtgagctttctgccgaaatattgctgaatcgtgtgaatcgtcagccctgcgatgacagaaatcacaagctgatctttcacgtattcgcgaatgttctcaatgctttctgccgcatctttcggtttaaaggcgagaacgataatgtcggtattgctgaaaaactcttctttatcccggcacggtttcactccgtacgttttttggagctcttcaagccggctgtcatttgaccggtttgtcatatatatatgtccgggggctgtcattccgctttgcagcagtccgttcaccattgcttccgccattgatccggccccgataaaaccgattttcttcatataaatcctccttcttctcaaaacacaaaaaaaaccttcccgtcaaaaaggacgaaaaggtttcgcggtaccaccttacattagcacgaatcagccgtgctcagctcaaatcccgtaacgaggggatacgtttaggttttcctaaccgctctgagggcaggttctgtaaacaagagggccgcaatgtctttcagccggggacattgctctctgctgccgttgtttatatactagttcctcgtcatcgcgttccgtgttttctagtttgttgttcattatgctatgcgcaagagcgggatgtcaatctttttttccgatatgcggcaataatgacacagtgaaaagaaaacgctaaaatatgattattcaggaatgaaaagaacgaaggagcgtaaacatggcagcgagaaagatcattccgatacgtgtgccgactccgtttgcagtcggcgacgttatcgtttatttagtaaaagatgaagccttaacccttattgattgcggcccgaatacaaaggaagcggctgaatcgctctcattgcagcttaaggaacacggggtttctgcggcggatatagaacaggtggtgctcactcatcatcacgcagatcattcaggtctgctgcacctttttcctgaggatacggaagtgatcgggcatccgctgaatgacaggtacattactcaggatcagtcgtatatcgcccggcaggaggacttttttctatcgcttatgactgaaatggacgttcccctgacgcctgaagacatacataaaacagttcagctgtcatacttattttctgcaaaccgtccgttaacgaaaacagtgagggaaggcggaaaaatcgacgggcttaacggctggacggtgctcgaaatcccgggtcatgccgcttctcacattgcgctctaccatgaaaaaagcggtgaaatgttcagcggcgatctgcttttgtccaacagctccaccaatccgattctggaagctccggaaaaggggagcgtgcgcgcggccccgatgctcgactacttgaactcaatgaagcggctgtatgacgtaaacccgtcctttttatatccgggacacggcgatctgctgacagacgtaaagcctgcttttgacaggcggcttgaaaaacagagaaaccggacggaatatgtgctgcgcctgttgtcagaggaaacgctgacggctttccaggtatgccggcggctgtttccggctgtgtatgaaaatgaattgtttttaacgatgtcagaaacgatcggccatcttgacgtgctggccgccgaagggaaggctgtatcctttcagtcggggaacactctgaagtttaaagctgtgaaggggtgaaggaaatgggcagattaacggataagcggatttggatcaccggagcatccggcggactcggagaacggcttgcatattcctgcacggcagaaggggctcatgtttttttatccgccaggcgggaggaccgcttgcaggaagtgaaaaagacgattaccgcgcgcggcggacagtgtgatgtcatcccgtttgacgtccggcatgcagaagaggctgaaaacgtaaggcgtttgatcggtcatgtagacgtattaatcaacaacgccggcttcggcatttttgaaacggccgctgattcatctttggatgatatgaaggcaatgtttgaagtcaacgtcttcggattaatcgcctgtacgaaggcctgtcttcctgtgatgcttcatgcgaaaagcggccatattatcaatatcgcctcacaggccggcaaattggcgacgccgaaatcaagcctttattccgcaacgaagcacgccgtgttagggtattccaacgcgctgcggcttgagctggccggtacgggtgtagccgtgacaacggttaatcccggtccgatcaaaacagacttctttacaattgcagataaagagggcggttatgtgaaaagcgtcggcagatggatgcttgatgccgaccatgtggctgagcgcattacatccgtgattctgacggataaacgggaaatgaatcttccgcgatggatgagcctcgggacgaagctgtatcagcttttcccatcgtttacagaaaaactggccggccgcgcattaaagaaaaagtaacaagggggaaaaaggaatgtccgaccgggatatacacaaggcattgatggcagagcctttagtcaggcaaatggcggaggcgcgtgaagtattttggatcaatccgcataaaaccgatgatccagtaaagcatggcgctgaatggaaaaaggagattgccgaagcggaagaaaggctgcgccggtttgcgccttatatcgcgtcggcttttccggagacgggagcggagggaggcctcattgaatctccgcttgtcttgattaatgaaatgaagaagcatctggaacacagcgccgctcaggctttccctgggcgtttgcttttgaaatgcgacgacgaacttccgatttccggttccattaaagcgcgcggcggaatttacgaagtgctgaagcatgccgaagatctcgcggtaaaagcgggtatgctctcagcagacgacgattacagcatattgactgaagaacggtttaccgcttttttctcaaaatactctatagccgtcggctctacgggcaatttaggtctgagtatcggcataatcggcgcgaagctcggcttttgtgtgaccgttcatatgtccagtgacgcaaagcagtggaaaaaggagctgctccgggaaaagggggttcgcgtcatcgaatatgaagcagactacagtctggctgtcaaagaggggcgcatgcaggcgaagcaggacccttattgttattttattgatgatgagcattcccgggatctgtttttggggtatgccgttgcgggaagccgtgtgaaaaagcagctcgatcaaatgaacataaagcctgatgcagatgaaccgcttttcgtttatttgccgtgcggggtcggaggaggcccgggcggcgtcgcgcttgcgctaaagctgatctatggcgagcatgtccatatttttttcggtgagccgacgcattcaccgtgtatgctgttaggactgttttccggcttgcatgacggaatcagcgtgcaggatatcggtcttgataatcaaacggccgccgacggactcgcggtgggaaggccgtccggattggccggccctctgatggaacctatactcagcggctgttataccgccgatgacggcacgcttttttcgctgctttatcaattaagggcggccgagaataagagccttgaaccctctgcactcgccggactggccggagccgtcaaggtcgttcagaccgaagccggaaaccgttatataaaagaacgggggcttgagatggaaaatgccgtgcaccttgtgtggagcaccggcggaagcatggttccggaggaggaaatggaagagtacagccgaatcggttcctcatttttgaaaaaaatgggcagacagtgaagcggttttccgttacaatctttgtaagcgtttgtttttttatcggaaagccatacagagagattggtgtgaattgtgaaaagtaaagaattgaacttacatacattgtatacgcagcatagccgcgagtcgtgggccggattcggcggccatctttccattgccgtttcagaggaagaagccaaggccgtagaagggctgaatgactacctgtcggtggaagaagtagaaacgatttacattccgcttgtgcgcctgctccatcttcatgtcacgtctgccgcaagacggaatcagcatgtcaatgtgtttctgaagcatccgcattcagcgaaaatcccgtttatcatcgggatcgcgggcagcgtcgccgtcggtaaaagcacgacggcgagaattttgcaaaagcttctttcccgtctgccggacaggccgaaggtgagcctggtgacaaccgacggttttttgtatccgacggcggaattaaaaaggaaaaaccttctgtccagaaagggattcccggaaagttacgacgtgaaagcgctgcttgaatttctgaacgatataaagtcagggaaagagagagtggaggcgcccgtatattcccatcttacctatgacagggaagagggcgccgtcgaggttgtcgaaggtgcggatatcgttattatcgaaggaatcaatgtcctgcagtcgccgaccttagaggacgacagggaagatccgcggatttttgtatccgatttctttgatttttcgatctatgtggatgccgaagaaagccggattttcacgtggtatttggagcgtttccgcctcttaagagaaaccgcctttcaggatccggcttcttattttcataaatttaaggatttgtctgatgcagaagcggataccatggccgcctccatttgggagagcgtcaaccgtccgaatctgtatgaaaatatcctgccgacaaaattcagatccgatttgattttgagaaaaggtgacggccataaagttgaagaggtgctggtaaggcgggtgtgatgtgaggaggaagcgaatattatgatgcatcatattgaattgtatgtatctgacgtgaaagcctccgcccggttttggggatggtttttaggtgagctcggttatagggaatttcaaaattgggactccggcatcagctggaaaaacgcaggattttatgttgtgcttgtacagacagaggagcgttttttaacaccggagtaccacagatgccgggtcgggctgaaccatctggcttttcatgctgcatcaagagagcaggttgacgagatgacagaaaagctgcttgccagaggatgccccgtgctttacagggaccgccatccatatgcaggcggaagcacgcattacgccgtatacacggaggacccggaccggataaaagtggagctcgttgctcctgcttctgaatgaactataacttttcgtttttttcttcgcgcagcgcgtcgagtttcttttcgattctgtccaattgtatgcggcgctgcttcaagcttctgaatacgtatatcacggcaaacaggaaaaccgaggctgcaataaatgaaatcaattgaaaaatgacatcaccgatgttcatcttttttacctccgtgtgcggcgggcttcttcagcccgccgttttttcattttgaccgatgtgaagacatgggggatgaatcatttctcatttctctcttagctttgtttttttctgagaatgaatagtttctgcatgtggcttatgaccacttttgcggccgcatatcccggaatggccagcagcatcccggcaattcctgagaatttgccggcggcaagcagaagaaaaataatggtcagcgggtgaatgtccagcttccgtctcataatttgcggggaaatcagctggctttcaagctgctggacaatgacgacgaccgtaatcaccagcaccgcctcggtcggtgaatcgaacaatccgacaatgactccgggaaatgtgccgatccaaggcccgataaacggaatcaggtttgtcaccatggcaaacgcgcccagaacgagcggataatcgagcccgattataaaatagccgatcgtgacgagtacgccgacacaaaaactgacgagcagctgtccttgtatgtatgaactgagagcttcatccatgtcccgaaggattcgttttccttctttttgatgtttttccggaagaagccgcagcagtcgccggggggctttgtttccttcttttaacatgtaatacagcgcaaacggaataatggcggcggtgatggcggcattggcagccgtaccggccaggctgctgagagaatcagcgattgaaccggaataatttgcggctttgtctgctaattttttaaaggaatccccatgctgaagccgggagaaccatttgctgtcctgaagatgcccgatccaattttcagcttttgcggaaagctccggaatatgatctgtgaaggctgtaaactgtttttgaacggcagggcccgccgtataaaggaagaggacaaaaaggccggctgttcccgcataaatcgctaaaatcgcgattccttcgggcagctttaatttcgcatgcagcagtctgacgagcgggcggcacaaatagtaaaggacgcccgataatacaataggcggaaacaaggttttaaccgtaatcacaacaggctggaacaaaaagtctattaatgttccgagataaatgatgagaaataacagaagaacggcataaccgatcctgaaataaggcccgataggcatatcctgcaccacgcaatctttaagggtttactctcggacgtttcccttatcgcccggtgcataaacgtccgtgtcaggaaaactgcccctgattggtgacgtaatcgtagataatatcttctacatgggcatggagatcctcatcgggttcttcattccttctttcttctaaagctttttttaaactctgtttttcataggggctcagcggatctgtcgacacattccgtccatactggcggagggcttgtcccagcattttttctataaattgatccatcatatattctcctattcttgtcattcatctttattctactaaatatcatgtgatcctcccactcttctatcatattttctgtcaggccgggtcaggatttttattccaattcagctgagagaatacgatgaaacggcagcgttaacgcatcttcatcgtttatgatttttaaacgcttttcgtcatgcatcacttgttttacccatccccaaaagcggcgggggccgtgtgctgaagcataggtgaccgagatggccctgtcttcttcaatcgacgccgcaatgatgcggttcatgtcgttcagttgctcttcgctcagttccggaggccggaattcccgttcttttcgtttttttgcaagcagctgctcccgatgttcgggcagcatcatccggcttgattcccacatgacattatacccgggtgttaatttgttcggattcatgtatatcacctcaaattatttgtagtgcccgccgattttttcagcccggtgaaaggcttggccggcctctgtcagtgaagcggcatggaggagcgacgcagggccgtaccgctcatgaatatcatccaatactttgccgagactgatctttttttcctgggcatcgaacaggctcagctgaacataatcacaaggctccagctgggaaagggagacgccggcgctgcggacgggctcaccgttccaatgctctttgaagagcttgaccgccgctttaaaaatatccattccgaaattagtcggagagatcagctttctctgtctgtgaaaacctgaagggaattcaaaatcagcgcctctgatgctgaccgaaaccgtatggccgatgtattgtttgaaacgggcgcggcgggccacttcttcgcttaactccagcagcacgactttaatatcctcaaagcggctgtagtctttcgggagggtcatgttatggccgatcgctttttgccggctgtgcgtgttgacggtgaccggagagggatcgatgccgcgggctgtccgctgaagcaattcgccgttaatgccccagcgttttttcagcaattcggcggggtgcccggcaagcccgccgattgtgctgatgcccatccgtcttaaatgatgctccatccgttttccgatgccgaataattttccgaccggcagcggccacagatcctgcctgatatttgacatatccaatctgtggatgccggatgcgttttttttggcaaaatggtcgcaagccattttcgcgagcgccttattcggcccgatgccgatacgggcataaattccgaattcacgcataatcgcttgctgaatgctttcggcaattgtaaaaggatcaccgaacagccgcctgcttccggtcacgtcgagaaactgctcatcgatggagtagggttctacaagatcggtataccgttcaaacagttcggtaatcatgacggatacatcaatataccgctgcatcctcggacggacaataacggcgtcgggacatttggcctgcgcttcccacagccgttcggcattttttacgccgtatcgtttggcgagcggacaagccgcaagcacgacgccgctgcgtctttcgggatctcccgagacaatcacgggccggcttttgagatgaggcgcttccgctttttccacagacgcataaaacgattgcatatcaacaagaagaatatcagccataaaaaacctccgggaacgtttgttctgtttttcattgtacccgaacaatgatcacgtttatactggtaaatcattccccggctggaagacgtgctgattcgtttgcttgaaaagaaatcatttacaattgcaaacaacccacatataattttttatattccaatgagaagagctgacattcattttgccggacgaaaaggagagtcaatcgataatggatattcgaacaattacctctgaagactatgaaatggttacgtctgttttgaatgaatggtggggcggcaggcagatgaaagacaaactgccgcgcttgttttttgaacattttcaggacacaagctttatcacgtacgggccggagggaatgaccggttttttaatcggttttcagtcacaatcagaccctgagacagcctacattcatttttccggtgtgcatccggatttcagaaaaatgcaaattggaaaacagctctacgaccgatttatggagacggtgaagaaaaggggctgcacaaaagtcaattgcgtgacggcgcctgtcaataaagtatcaatcgcttatcatacaaaattaggctttgaagttgaaaaaggaaccaaaaccgtaaacggaatccctgtttttgcgaattatgacggtccgggagaagaccggattctgtttgtgaaatatatgtagagggggatgaataatgggttttttagctgacacgcccaaaccgccctattatgcggtcattttttcatcaataaagggaaaatatgatgaggaatatgaacatacggcagagcgcatgatgaatttggcaggcggacagccgggctttttaggcgcggaaagcgtccgggaggaaaacggctgcggcatcacggtttcctactgggacagcctggaggcgattaaaaggtggaaagatcatactgaccaccaggcggcaaaacaaaaaggaaaaagcgcctggtatgaagcgtacgcggtccgcattacgaagacggagtcacagcggatgtttgcgtcaaaaggggcggaagattgattacatttttacagcatacacaagaacagaccgcgcgggaaattgcggcggttcagcgctgctcttatcaaaaagaagccgagctgatcggctttttcggcattcccgccctgcatgaaacacccgatgatatacagcggtcacgggagacgtttgccggtttcaaggaaaaagatcagcttgcaggcgtcatttcgtatgaaaaaaagggatatgaccttgtcatatgcaggctgacagtgcacccgtccggctttcggaaaggaatcggacgggcgcttattcaatttgtgatagatcaaaaccgggacgcccaaaaaatagaggcggctaccgccagccaaaacgttccggcagtctctctctatttaaaaatcgggttcacagaagccggacagatagagacgccggaagggctgaccctctcgttttttcatctttatccgaagaggaaagcggaagttgttccgcacaagccggaatggaaagaaatgtttgaaagagagaaggcggacttgatccgaatcttcggctcagcacttcattctgtcagccacatcggcagcacctccatcccgcagatggccggcaaacccgtcatcgatatactggcggaggtcaaagatatttcggacgctgaccgattcagtccgcagctggaagcactcggctatgaggcgaaaggggaaaacgggatagagggccggcgtttctttcaaaaaggcggcaacaagcgcacacaccacgtccacatatacaaaacaggccatccggacgtgaagcgtcatctgctgttccgggattacctcaccgcaaagcctgaaaaagcggctcaatacatggaactgaaacggcacctcgctgagacatacccatacgatatggcaaagtatagtgaagggaaaaatgactggatcaaggcggctgaacaagaggcaaaggactgggagagcgggctgctgtaaagaaagcagaaacaatgcatacagcggctcggtatgctacaatggcgaaaatgaaaaacggaggatcatctatgcaaatacatgtgacggatgcggcgaaacacacacttcagcaggcgatggacgccaacccggggaaaaaagcgcagctccgctatgacgcagaaggctgcgggtgcgcggtgagcggtgtgccgaccatctggctggcggacgaattaacgggacaatgcgaagccattgaaaccaacggacttccgctttacatccagacctcacaaaaagtgttttttgacgaggaaatgacaatcgattacaatgaaaaggcaaaaacgctcgtcttaaaaagcccggcagagatgctgagcccgagaatgagcatattagtaaagcagggagaaacggaaagtgaatcaaaagctgaaagccattaaacagacggcacagcataaaacgtgggtatcctttctgaacaacaaccacccgtacagtctgctgcactggtctattggaggcgctgaatccgttcagaaggatgtctggctgcttcaggatgagatgaccttcaaagcgcaggagtttacgacaatcgacctcgccattgactggatcggagaaaatatggacgggattaccgacgttttatgacgggaaagcgaaagaaccagcatacgttctttcgcttttttacgtttacgtcatggtatctaaaaaggtttgaacggctttacggtagctctccggatttttggtgtacgacatggcatgcccgcccgattcggccagatagagcatcttagggccgcgttttctgcggtgcagcaattcggaagaagcggccacggaagcagccggaactcccgcttcagtctgtaggcgagctgatcgcgaaagcttgcgaacggacagtccgcaatataaaaatcagcgccgttttcatcctgatgcccgcccgcgtataataaggccgtcaccgctcccatcgattccccgtgtatgccgatttgaccgacgtctccggttttgtgtctcacccaattcacggcttcttccaaatcatctttttcaaaatagccgtagctcgtcgttctgccgccgctttttccgtgcccgcggtggtcatatacgagcacattccagcctaaatctaaaaataaatccatgtatttcaatgaattgaacgaatttacggtaacgccgtgacaaataatcatggtgtttgccgtatgatgcggggcgacgtaaaagcctttgatctcatacccgtggcgcgacaggatgacggcatcttctttttccatggcctgaaaggaatcaaatctatcatgcccgtccgccgtttcttttttcatgatttcttcatccgtctttttcttcataaacataatcagattcgtaaaagcgaatccggcagccaaaaagactgcgcaagccgaaccgaacaccgccagccattttttcacacaggtgccctcctttaatatgaaaaatccttcctccggctttttgggaccgtgaacgttgccggcctccggcgctccgtggtacacttgcctcaccatattcagatacggggggcgtaatgatgaaaaagcagctgcctaaagaaaaacacagcttaaaagacgatctggaggaagatctgaaggccaagcttttgcaaatgaaaagtgagctgaaggaagaagacgagaaaaaacaggcgcagcaaaaggcggaacaaatcagaaaacgaaaagaaaaagaaaaacataaaagctttgaagagctgctgaatgaaagcagtctcgattggcataaatataaataaaccggcatctgaaaaggtgccggttttattgtttaagaacgatgggcttcgtatatgtcccgttttgtatggtattgcagggctttgatttcctggctgcttaaacgacgggcctctgcagccgaacagttttctctcagctgctcaagtgagctggctccggtgatgacagaagcgacagccggctgtgacagtaagtattgaagagaaagctccgttatgctcaagtcaggtgcggcagcgctgatcgcttttttggtttctgccagttctgcaaaagaatatgttaaatagccgttctcttttacgcttgcggccgcttgatcaagcggtttttccgtaagaagccctttagcgacaggccctcttgcgactacgctgattccgttctcctctaaaaggggaagccactcctcggggcgccggtccagcaggctgtattgcatcataacgctggtgatatttgattttttcacatattctttaataacattcggacgaatcgaggaaatgccgtaataacggatgacaccttcctgttttaagtcctcaaaagcttcgatcgtttcatcaatatggtcttccatcgtgccgccatgcagctgataaaggtcgatatagtccgttttcagccggcgcaggctgtttttgaccgcttcttttatgtagcccttggaagcgtcccaatgccagccgtctttattatcattccagcggtttccggctttcgtggctaaaatgatgtcgtgcctgcggtttttgacggcctccccgacaatttcctcatttctgccgaaatcataaagatcagcggtatctaaataattgattccaagctcgatcgcttcatccaaaatagacagcgctttagctttatccgtgcccagcgacatacagccgagcccgatttcgcttatttctaaatcagaatgtcccagtgtgcgttttctcatcgtttcgctccttttaatagtcttttattgaccgtaatataaaggcgcgaagttttcaactgttaaggcccggtgatccaatctccgacatagcggaatgtccgtccgtattctttcagtttagcccgcacttcccacgcctttccgaccaatacgatactcttatccttccggtacaccttcaatcgaaaagcacctccctctcatgcatgtatgataaaatatatgaggcataatagagagacagaacgggagatgacatgatgaaacatttagaagaaaaaacacttgcgaaaaaaaagctgtatgacgggaaagtcatagatctttacttagaggatgtagagctcccgaacggaaaaacaagcaagcgggaaatcgtcaaacatccgggagcggtggccgtacttgcggtgaccgaggaaggaaaaatcattttggtgaaccagttcagaaagccgctggaacggacaatcgttgaaattccggccgggaagcttgaaaagggggaagagccggaacatacggcgttaagagagctcgaggaagaaacgggatatacggcggaaaccttgacgaaaatcaccgctttttatacatcacccgggtttgctgatgaaatcgtgcatctctttcttgcggaagggctttcgccgctggaagaaaaacgagagctggatgaggatgaatttgtcgaagtcatgcaggtcacgcttgaagaggccgtgaagctgattgaatcccgcagggtgtatgacgcaaaaacggcgtatgcgattcagtatctccagctgaaagaagcgctgaaggaaaaatgatgaaaaccatctatgcggacctgcatattcatatcggccgcacctatacgggaaaaccggtcaaaatcaccggggccaaaacgttgacgctgcacgggattttagaagaagccagtgaggggaagggaattgaactattgggcatcatcgactgccattccccggaagtcatagaagaaatcgagcgcggaattgatgaaggcagataccgtgagctgaaagaaggcggcatccggtatcggaatacgacgcttctgttgggcagtgagcttgaaatctatgatcacacatgccgcgggccgattcacgttctcgtctttatgccggctcttgccgaaatgaagatgttttctgagtggctcgcaaaaaggcttaaaaatatccatctcagttcccagcgcatttatgaaaccggtttgaatcttcaaaggaaaacaaaggaattgggcgggctgtttattcccgcccatatgttcaccccgcataaaagcctgtacggaaaaggggtcctatcttctttgacagaagttttcgacccggcgctcattgatgcggcggaactcgggttaagctgcgacaccgacatggcttcgcgggtaacagaacttgatccgtatacatttttaacaaattctgatgcgcattccttagggaaaatcggcagagaatataatgaaatgcttcttaaagaagcgaatttcacggaattttcgctggctttaaaagggaaggacggaagaaagatcacggcgaattacgggctgaacccgaagctcgggaagtattaccggacggcttgcgaccgctgcggcagcccggttgaaaaaggagcttccgcctgtccggagtgcggggggaaaacaatgacaaaaggggtcagtgaacggctggaggaactgagcggaccgaaaaaaagccgcgtgccgcggccgccgtatattcatcaaattccgctgcagttcattcccggggtcgggccgaaaacgttagaaaaactgaagcgggatttcggaacggagatggcgattcttcatcaggcgcaagaagaggaattggcgcgtgtcgtccagcctaaaatagcggctgtcattcataaagcgcgcaccgggcagctcgtccttgaggccgggggcggagggacgtacggcagaatcaagccgtaaaagccggttttttagcggagctcctcctgcaccttctttttcgtgcggacaaacgcaatcaattcgatgatttcatcctgattcagcggctgtccgtcaacggtcagtgtgccgcggccttgtgcggcgtttgttaattcgatggtctgtgcaaacggctccgcctttttttcagtgcgccccagtaaatcgtcgcacgtcgtgtcaaacagatcggcaagcgtgcccagcgcctcgaatgacggacgccggtatcctgattcatacccggcgtacgtgcttttggcgatgccgagacggtcagccgtatattgaagagaccaatttttcttttttctcagttcagttaaacgatctaaattcatattcaaaaccgctccttttcacttgagcaaattatatcatatcgatatgcaaaagtgtacgcgaattgaataataatcacttgattaatttcattcgtctgtctataatttgattaaaagtatgcgaaaagcgaatgcttaacacatcttgagaaatggatgaagaggtgcagggtatgaaaaaattattgctgttaacaaccggaggaacaatcgcctcagtcgaaggagaaaacgggcttgcacccggggtgaaagcagacgaattgttaacctacgtatcaaaacttgataacgattacacgatggaaacccattcgttaatgaacatcgacagcacaaatatgcagcctgaatactgggccgaaatcgcaaatgctgtcaaagaaaagtatgacgcatatgacgggttcgtcattacgcacggaacagacacaatggcttatacatcagcggcactgtcttatatgcttcagcatgctgataaaccgatcgtcattacgggttcgcaaatcccgattacatttcaaaaaaccgatgccaaaaaaaatatcacggacgcgatccgcttcgcatgtgaaggggtgggcggcgtatacgtcgtatttgacggcagagtcattcaaggcacacgcgccattaaattgagaacgaaaagctatgatgcatttgagagcattaactatccgtatatcgcgtttattaccgaaaacggaattgaatacaacaaacaagtgcacatcccaaaagacgatgcttttacggtcaatacttcactttgcacggacgtgtgcctgctcaagctccacccggggctgaaaccggaaatgtttgacgcattaaagggcatgtacaaaggaatcgtcattgaaagctacggcagcggcggcgtgccgtttgaaggaagagacattctcgccaaagtcaatgaaatgattgaaagcggcattgtcgtcgtcattacgacacaatgtcttgaagaaggagaggacatgagcgtctatgaagtcggccgaagagtcaatcaagatctcattatccgctccagaaatatgaacacggaagccatcgtgccgaaattaatgtgggcgctcggccagtctcataacttggctgaagtcaaaaacattatggagacaccgatcgcagacgacgttgtactgtaaaaacatgactaccacaaagagaaagtagggttttagcatgacaaacgcgcaaaaagaatatcgtcaggaaaaagatttcctcggagaaaaacaaattgaagctgatgtgtattacggaatacaaacgctgcgcgcgaaagaaaactttccgattaccggctaccgcatccacgaagaaatgattaatgcgctcgccatcgtcaaaaaagcggcggcgcttgccaacatggatgtaaaacggctgtatgaaggaatcggaaatgcgattgtacaggccgcagatgaaattcttgagggaaaatggcatgaccaatttatcgtcgatccgatccaagggggagccggaacgtccatgaacatgaatgccaacgaagtaatcggcaacagggctcttgaaatcatgggccataaaaaaggtgaatacattcacctcagcccgaacacacacgtcaacatgtcacaatcgacgaacgacgtgttcccgacggcaatccatatttcaaccttgaaacttttggataagctccttgatacgatggcgcatatgctcagtgtctttaaagataaagcgaaacaatttgattctgtcattaaaatggggcgcacacaccttcaggacgctgtgccgatccgtctcggacaggaatttgaagcatacagccgcgtgcttgagcgtgacataaagcgaattaaacaatcccgccagcatctgtatgaagtaaacatgggggcaacggccgtaggtacgggacttaacgccgatccgcgctacatagaacaggttgtgaagcacctggctgacatcagcggactgccgcttgtcggcgccggccatttggttgacgccacacaaaacactgatgcgtatacggaagtttcagccgcgttgaaagtatgcatgatgaacatgtctaaaatcgccaacgatctgcgcttaatggcttcaggtccgcgcgcgggacttgcggaaatttcactgcccgcccgtcagccgggatcatccattatgcctgggaaagtcaaccctgtaatggcagagctgatcaaccaaatcgccttccaggtcatcgggaatgacaatacgatctgcctcgcttcagaagcgggccagctggagcttaacgtaatggagccggtactcgtatttaacctgcttcaatccatcagcatcatgaataacgggttccggtcatttaccgatcattgtctggcgggaattgaagccaacgaaaaacgtctaaagcaatacgtggaaaaaagcgtcggcgtcattacagcggtcaatccgcacctcgggtatgaagcggctgcgcgaattgcccgtgaagcaatcatgacggggcaatctgtaagagatctttgccttcaaaatgatgtactgacagaagaagaattggatatcattttgaatccgtatgaaatgacaaaaccgggaattgccggaaaagatctattagaaaaataaattttaaagcaacaacagccgccttttcacgttttttagtgaataggcggttgccatacaaagggatgaggcagtatagtataatttgttatatcatttgatgaaagcgttttagcttttttcttctagggggattttcttgtgaaagaggtcagattgccaaatttattggaaataattatcttattattcgggtttttagcacttgtcttatcgttcacagtgtttttagacttgccgatccagctagctctattaatatcctggtttttcgctattattctcggagtcaggctgggatattcatataaagacttgcaggattcgattgtcaccgggatatcaaacggtcttgaagcggtgttgattcttgtttcggtcggtgcgctcatcgggacatggattgccggcggcgttgtgccgacgttaatttattatggtttagagtttattaatcctcatgttttccttctggctacactggttatttgttccgttatgtccgttgcgaccggaacgtcgtggggaaccgtgggaaccgcgggaatcgccatgattgccatcggagagggaatgggtataccgcttccgatcgtagcgggagccgttttgtccggcgcttacttcggagacaagctttcaccgctgtctgacagtacggtgcttgcctccacgctttctaaggtggatgtgctgtcacacgtcagagcgatgatgtatctgtcaattccgtcctatattattacggccattctatttaccgtaacgggatttatatacggcggaaaaaatattgatctcgacaaagtagaatttttaaaatcttcactgcagaaaacgtttgacattcatatatggatgctcattccggctgttgtcgtcgttgtccttctgattttgaaaaagccgtctatgcccgttatcgtcatcggtgctttgcttggcgcaatctgggcttccgtctttcagggaatgaattttgccagtgccatcgcgactgcttataatggtttttctattaaaacggacgtcgaatttttaaacggcctgttaaaccgcggaggcattaccggtatgctggatacgttagtcgttatcctgttcggtctcggttttggaggaattcttgagaagctcggcgtattaaaagtgattgtctcaacttttgagaaaaagctgaccacaccgggaaatgtgacgctttcgacattgatcgtcgcccttttaggaaacattttcggctgtgcgatgtacgtgtcattgattctgacgccgaaaatcatggagaacagttatgataaactgaaacttgacagaagagttttatcccggaacgcagaggtgggcggcacgcttacttcagggatggtgccgtggtctgataacggcatctatatggccggcattctcggcgtatccacattttcttatctgccgttcatgtggctcagttttgtatctatcggactggcaatattgtacggatacacggggaaattcatttggtacacgaaagaaaaatccttgcaatctcaaaaattgggttaggaggttcatttcatgattacaaagcatatgattcggacgttaatgattgaaacgccgactgttcccggaaatctcggaaaagtggcaaccgccatcggagtgatgggcggagatatcggggaagttgaaaccgttaaagtcggcccgaactacacaatgcgcaacattacggtgcaggctgaaaacgaagagcagctgcaggaaatcattcaagccattgaagctctcggtgaaggcatccgtcttcatacagtctcagatgaagtgctctctgctcatgaaggcggcaaaattcagatgaaaagcaaaatgccgatccggacattggctgagcttggccgtgtttatacgccgggtgtcgccgatgtgtgcagactgattgaaaacgagcctgaaaaagcgtccatctatacgacaatcagcaattctgtcgccattgtcaccgacggcacggcgattctcggcctcggcaatatcggctctgtcgccggaatgcccgtaatggaagggaaagccgcgctttttgaccagctggcgggtatcagcggaattccgattttgctcgatacctctgatccggaagaaatcattcgcacggtaaaacatatttctccggggttcagcggaattctgcttgaagatatcggttcgcctcactgctttgacattgaagaccgcctgaaagaagaactggacattccggttatgcacgatgaccagcacggcacggcggtcgtcacgctcgccgccgccatttccgcttgtaaaagcgccggtcttgatttaaaagaagcgaaggtcggtcagatcggtctcggcgcggcaggcgtcgccatctgccgcatgtttatggcatacggagtcaaagcggtctgcggaacggacaaatcagaagacgcaatgaaccgcctcgctcagtacggaggtcagccgcttggaagcatcaaagaattaatggacacgtgtgacattgtgatcagcaccacaggggttccgggtctcattaaaaaagaggatgtcagaaaaggacatgtcattctggccttatctaatccgaagccggagattgaaccggaagaggcattacaagccggagccgcttatgcagctgacggccgttcggtcaataatgttctcggcttcccggggattttccgcggcgcgctgaacgccaaaagcaagaaaatcgaccatgaaatgcttgtggcggccgcagaagccatcgcctcttgcacaaaacacggcgatctcgtgcctcagcctttggatgcggacgtgcatcaggccgtatcagcagccgtagaacgggccgcggcaggaaaataaacaactcttacagtaccggacatgtgccggtgctgtttttttatcatgaataggaagcggaattcttaggcaggctaacgatagcaaaagacggagtaaagaggtgtcgatgtggattattttccgctgatccatacaaatatttgggatgctgtgatcggcgtgccggtcgtcttatgcgtcacacagctgatcaaagtgttctgccgggttccgggcatattcgttcccacgattgcccttgctgtcggaaatgttgtgtctatcgttttcggtcaccatgaacacgtgtatgcggggatttttatgggatttttttacggatacgccgcaatggggagctattcatctgcgaaaacgtctctgcgcgcttaccggtcgaaacatgagccgtattcatgaacacatctggatttttttgttatgataaagaaaagggaaaaaggagcgattggcacatggcgaagagcaaaacaaaaaaaatgcgggagcatctcaaaagaaacgggatgcgtgacgcagtcctgtcaagggggacggcgccgtctttcagcacccatgaaagagtgacgaaaaccaaaaaagacaggcttgaaagaataaagcataaaaaagggaacccctatgatcaccggagtgatgacgggggttctttttttatgcccgaatctcgcgcctttctatgatttctctgtcatgttttctcttttctttcatacaatctactaaatcaagtcaatagattagcgggaggaaagcggtatgagaaaacaatcgtacaaagaactgtttttttgccatgtaaaggatcatctgtcactttatatatttgtgttcgtcttgtttttgatgggggtcattttcggggcgatcatcgtcaacagcatgaccatcacgcagaaagaagatctgtattactatttaagcaagtttttcggacagctgtctgacggaaaacatgccggcgcttcagaaatgttttggcaggccgtctttcatgatgtgaaatatttggggctgatgtggattctcggtatttccgtgatcggtctcccggttattttcattatggtgtttttgaaaggaatcgtcgtcggcttcacggtcggttttttagtgaatcagatggggatgaacggatttttcctgtcatttatttcggttctgccgcaaaacatcgttctcattccggcatatcttatcatggggacatgctccatcgctttttcactgaaactgatccggcagctgtttgtcaaacgcagccttcatgacgcgccgatccaatggttcggacgctacgccttcgtgctgattctcatcgttttcttctcggtcatcgcctcgctgctcgaggcgtacgtgtctccgctgtttatggaaaagctgtcatcacgcatattttagaatgattatcacaaaataatacttttatttatcagtttataataattatagttggaactctgcgcgtattttgttataatgagtcatggaatgcggcgtaggagggaaagacatggaaaaccgtattgatcgaattaaaaagcagctgcactcgtcaagctacaagcttacgccacagcgggaagcaacggtaagagtgctgcttgaaaacgaagaagaccatttaagcgcagaagatgtatacctcctcgtaaaagagaaatctcctgaaattggtctcgctacagtataccgtacattagaattattaacagaattaaaagtcgttgataaaattaacttcggggacggcgtatcccgctacgaccttcgcaaagaaggcgcggctcactttcatcaccatttggtgtgcatggagtgcggagccgtcgatgaaattgaagaagatctgcttgaagacgttgaagaagtgattgaacgtgattggaaatttaaaattaaagatcatagattgacttttcacggaatctgccaccgctgccgcggggatgaaacagagtaaaagcctacgaaccttttctgccaggaaagggttttttgctgtttttatgtataaaagcctttgaaattggcataaggtgtactaacagccgccaacagaaagggtcgatcgaaagatgggcagattcctaaaaacagccgcggatacgatcaaagtgtttattctgttcacaggttttaccgcgctgttctattatgctatgatatgggtgaattcagagtatgaaaactatcatcggtacgataaaccggaaggctccgccgtcaaagtggccaaaacggaacatgaggagaaagacggctggttcggccgattgatctttttttaccaaaacggggagtagatcaagagtgaaggatcaaattaaggatttcatccattatgtgagggttgaaagagggctgtcccaaaatacgatgatgtcctatgagcgtgatctgaaaagttattctctcttcttaactgaaagccttcagatcacttcatggaatgatgtgacccgtcttcatattattcaatatttaaagcatataaaggactccgggaaatccggcaagacgtctgcgaggcacttggcgtcgatccggtcttttcatcaatttctgttaagggaaaaagccgcggataaagatccttcggtacatattgaaacacaaaaaacagagcggacgcttccgaaagtattggcgcttcacgaagttgagcggttattggacacgcctaagcttgacagcccgttcggtctcagggataaagccatgcttgaactgctgtacgcgaccggcatcagggtcagcgagatgatcgagctgaaattatccgacgtccatttgacgatgggatttgtccgctgcttcggaaaagggcggaaagagcggattgtgccgattggtgaagccgcttctcatgcgatagaagcatacattgaaaaagccagagggaaattattaaagaaaaacgtaaccgaagcgctttttctgaatcatcacggcaggcagatcagccgtcaaggtttttggaaaaacctgaaaaaaatcgcccttgaagcggggattaaaaaagagctgacaccgcacacgcttcggcactcttttgcaacgcacctgctcgaaaacggggcggatctgcgcgccgtgcaggagatgctcggacatgccgatatttccacgacgcaaatttatacgcatgtgacgaaaacaaggctgaaggacgtgtacaaacagtatcatccgcgcgcttaggagccgctgccagaggggccgcggctttttttgccggattggcggaatacagagaaggttctaattatttgaatcggcattgtcaacaagaatgtaaacggtttatacttgagttgtctgacctctgtaagctacaatggacagatggaagaaaaggaggtttttatgatgtctgaatacaaatataaccgggtatttttgatcgtaatggattctgtcggaatcggtgaagcgccggacgcagccgattttaatgatataggcgcaaatacgctcggacacatcgcagagcacatgaacggcttacatatgccccatatggcgcagctcggtctcggactgatcggagacattaagggcgtggaaaaaacggagcatcctcttgcgtactacggaaaaatgcaggaggcgtcaaacgggaaagatacgatgacggggcactgggagattatgggcctctacattgaaaaaccgtttaaagtgttcccggaaggatttccggatgaacttcttcaggaacttgagcggcgttcaggacggaaaatcatcggaaataagccggcttcaggcacggcgattctggacgagctcggaaaagaacatatggaaacgggtgcgctgatcgtttatacatcagcagattccgtcctgcagattgcggctcacgaagatgtcgttccgcttgacgaactgtacagcatctgtgaaacggccagagaactgacgcttgatccgaaatacatggtcggccggattatcgcaagaccgttcgtcggagaaccggggagcttcaaacgcacgccgaaccgtcatgattatgcgctcaaaccgttcggccgcacggtaatgaacggaatgaaagacagcggattagacgtcatttccatcggcaaaatttctgatatttatgacggagaaggcattacatcttcccgccgcacggtatctaatatggacggcatggacaaagtgattgaaacgctcggtgaagagttcaccggcctgagctttgccaatctcgttgattttgacgcgctgtacggacaccgccgcgatccggaagggtacggaaaagcgctcgaggaattcgacgcgaggcttccggaagtgtttgaaaaaatgaaagaagacgatctgcttatcatcactgcggatcacggcaatgatcctgtccatcacggcacggatcacacgagggagtatgtgccgcttcttgtgtacagcaaaaagcacaaacacactgaacagctgccgcttgcggatacatttgccgatatcggggcaaccattgcggataatttcaaaacggaaaagccggaatacggaaaaagctttttatcaagattacagtagggggactttttttgaaacaaaagatcgaacgtgctgctgcatttattaaagaacacgtgaaagaaacaccaaagatcggtctgattttagggtcagggctcggcgtattggccgatgaaattgaaggggctgtcaagcttacatatgaaacgatccctgattttccggtctcaacggtagaaggccatgccggccagcttgtgatgggaacgcttgaaggtgtgcaggtcatcgcgatgcagggccgctttcattactatgaaggctactcaatggatcaggtcacatttcccgtccgcgtgatgaaggcgctcggcgttgaatcccttgtcgtgacgaatgcagccggcggtatcaacactgaattccgcgccggcgatctgatgattattacagaccacatcaactttacgggcaccaacccgttaatcgggccgaacgaagctgaattcggaccgagattcccggacatgtcagaagcctatgacaaagagctgtcaagcttggctgaaaaaacggccgatgagctgggcattcctgttcaaaaaggggtgtatacagctgttacggggccgtcttacgaaacgcctgctgaggttcggtttttaagaacgatgggttctgacgctgtcggcatgtcgaccgtgccggaagtcatcgtcgccaaccacgcggggatgcgcgtgctcggcatctcatgcatttccaacgcggcggcaggtattcttgaccagccgttatcccatgaagaagtaatggaaatgacggaaaaagtaaaaggcggctttttgaagcttgtaaaagccgtagtcgcacgatctcaaaaataagtcagcatcagtcagctgtttcttcggaagcagctgtttttttatgccctcaacacgaaacattttccagatgaggcgtataaaaccaccggatttggaaaaaataaaaaggattatgaaatggagggctttggagatgaaacgtcttatatccactttgttgattggcattttattaacggcatcagcaccgtccgcttttgcaaagccggacggaaaacatacatcggagctcgctcatgaagccaaaagcgccgtgctgattgaacgcgatacgggaagcattctttataacaagaacagcagggagcgtctggcgccggcaagcatgacaaaaatcatgaccatgcttttaatcatggaagcgcttgacaaagggaaaataaagatgagcgataaagtcaggacgagtgaacatgctgcgtccatgggcggatcacagattttccttgaacccggagaagaaatgacggtaaaagaaatgctcaaaggaattgcgatagcttccggaaatgacgcatctgtcgcaatggcggagtatatcgccggttcagaagaggatttcgtcagccggatgaacaaaaaagcaaaagaattgggattgaaagatacctccttcaaaaacccgacgggactgcccgaaaaagaccattacagctctgcttatgatatggcgaaaatggcgaaggaattattaaagtatgataaaatcactcaatttacgggaacgtatgaggattatttaagagaaaatacagacaaaaagttctggctcgtcaatacaaaccggctgatcaaattttatccgggtgtagacggcgtgaagacgggctttacaggcgaagcgaagtattgtttaaccgccaccgctaaaaaaggaaatatgagggtcattgctgtcgttttcggagccagcaccccgaaagaaagaaatgcccaagtgaccaaaatgcttgattacgccttcagccagttcaaaacacacccgctgtacaaacgggatcaaatcgtcggaacggtaaaagtgataaaaggaaaaaagaaactgatcaagctgaccacatctgagccgatttctcttctggccaaaaagggagagaacatggacaaagtaaaaaaagaagtgaaaatcaacggcaatgtaacggctccggttaaaaaaggagaggtgctcggcagcctcgttctgaaaaaagacggaaaggtgctcgttgaaagcccggtcacggcaaaagacgacatggaaaaagcgggttttctcacttttctgaagcggacgatgggagattggacaaaatttaaataatcgtggcgaacgggcactagttttgtcatagtgaaggaattgctttcccgaaaatcgaaacactcattatccgatcatatcaaggaggaatgagcatgagccttggaattgactttcatgtcaaagaatccgtgctttgtattcgattaacaggtgaactcgaccatcatacggcagaatcattaaaacaaaaggttactgaatcgctggaggctgacggcatccgtcacatcgtgctgaaccttgaagatcttaccttcatggacagctccggcctcggcgtgattttagggcgttataaacaaattaaacagctcggcggagaaatggtcgtgtgcgcgatttcgcccgcggtgagacgtctgtttgacatgtccggcctgtttaaaatcatcaggttcgaacaatcagaacaaaaagcgcttttaacgttgggggtggcatcatgaaaaacgagatgcatcttgaattttcagccctcagtcagaacgaatcgtttgcgcgcgtaacagttgcttcttttatcgcacagctcgacccgacgatggatgagctgacggaaatcaagaccgtcgtatcagaagcggtaacaaacgcaatcatccacggctatgaagaaaattgcgacggaaaggtgtacatctctgttacgctggaggatcatgtcgtctatctgaccatacgtgatgaaggcctcgggatcacggatcttgaggaagcgcgccagccgctctttacgacaaaacccgagcttgagcgctccggaatgggctttaccattatggaaaacttcatggatgatgtcacgattgattcctcgccggagatgggaacgacgatacgcttaacaaaacacctatcaaaaagcaaagcgctttgtaattaaggagatttgttatggatgtggaggttaagaaaaacagcaaaaacgcgcagctcaaggaccatgaagtcaaagaattaatcaaaaagagccaagagggcgaccagcaggcaagagacctcctcatagaaaaaaacatgcgtcttgtgtggtccgtcgttcaaaggttcttaaacagaggctatgagccggacgatctgtttcagatcggctgtatcggattgttaaaatccgttgataaattcgatttgtcctatgatgtccgtttttcaacttatgccgtgccgatgattatcggagaaatccagcgcttcatccgcgatgacggaaccgtcaaagtatcaaggtctttaaaagagctcggcaataaaatacgccgggcgaaagatgaactgtcaaaaacatacggaagagtgccgaccgtccaggaaatcgcggatcatttagaaattgatgcggaggatgtggtgcttgcgcaggaagcggtgcgggcgccttcatccattcatgagaccgtgtatgaaaatgacggagacccgatcaccctgcttgatcagatcgccgatcattcagaagagaagtggtttgacaaaatcgctctcaaggaagcgatcagtgatttggaagaacgggaaaaactcattgtctatctgagatattataaagatcagacacagtcggaagtagccgaacggctcgggatttcccaagtccaggtatcgaggctggagaaaaaaatattaaagcagattaaagtgcagatggatcatacggaaagctgaccttttacgggccggctttttttatttgtgcatcggtggtaatttatggtcttttgccgctgatgaatgagaacaaaagtgaaccacatactacatatataaccacccgaaagatggtgatgcaagatggaaagacgaatatttctcagacttcgccaccgcgtgaaggctcataccggagatatcatcacaatcggcgacgccgcgcagatcgcgggacagcaaaagctgaaaaaaaaactgtcggcactgccgctgtataaggtcacgaaaaaagacaaaaatatcgtcgtgctggacatcataaaagtgctgaaaaccattcataccgcttttcccgcgcttgatgtacagaccgtcggcggcgctgaaacgatagtggaaatccattaccaaaaaaagcagctgtcagccgttttattcgtcggtgtctggctcctgctttttatcggttcatgtcttgccattatgaattttcatgaagatgtcagtatgagagaagttcatatcgccttatatgaaatcataacgggcgaacggaatgaatatccgtatctgcttcagattccatacagcatcggcctcggtctcggtatgatcgtcttttttaatcacatcttcaaaaaacgcctgaatgaagagccaagcccgctggaagtcgagatgtttaattatcagcttgatctcgatcactatgtcgcaatgcacgaaaatgaagagacgatgaaagatctgcatgatcgttagcattcttttcgttatatttgtcgggcttggcggagggctgaccgtgggtgcgggctttgtggcttttttaaccgttatgggaatcgtcccccgccttatgcagctgacaaaaacaatgcgctttgtacaggcctacgaaggagctgttatttcaggagctgtgttcggcggctgggaaaccttaaatatgaatcatttttttttatctgaatggctggccgttccggtcgggcttttggccggtatgtttgtcggcatgctggccgccgcgcttacagaagtgctgaatgtgcttcccattcttgccaaacggatcggcttcggcagcaaaatcatcatattgctgatggccattgtgttcggcaaaatagccggctctttatttcattggctgtattttatccatcattcataaggaggaaccgacgtgacaaacttaaaagaaaattacaaaacaaaagtgaaagactatcagccgaaaccgccatatgtttggaattgcgtcaaagcctttctgatcggcggtttgatctgtctgatcgggcaggctcttcaagacttttacatccacttttttaattttaatgaaaaaacagcgggcaacccgacggccgccactcttattttaatttccgcccttttgaccggattcggcatttatgacagactcgggcagtttgccggagcgggttcagccgtgccggtgacgggttttgcaaacagtatgacaagcgccgctctggaacacagaagtgaaggactcgtgctcggggtagcgacaaacatgtttaaattggcgggaaacgtcattgtattcggcgtcgtggcagcctatatcgtaggcctgatacggtttgcttgtgaaaaactgttttcgtaggaggagaaaaaatgaaattgaccggaaagcaaacctgggtgtttgaaaacccgttatttgtaaatgcggcggggacggcagccggaccgaaagaaaaagacggcccgctcggttcgctgtttgataagacatacgatgaaatgcactgcaatcagaaaaactgggaaatggcggaacgtcagttaatggaagatgccatcaactccgctttgcaaaaacagaatttgaaaaagagcgatattgatttgttactcgcgggggatcttttaaatcaaaatgtgaccgccaactacgtcgccagacatctgaaaattccgttcctctgtctgttcggcgcctgttcgacttcaatggaaacgattgccgtcgcatccgcgctcattgacggcggttttgcgaaccgggcgatcgcagccacgagcagccataacgcgacggcagaacggcaattccgcaatccgacggagtatggcgggcaaaaaccggataccgccacttcaacggtcacggggggcggggcggtcattatcagccaaaacccttctgatatcaagattacaagcgcaacagtgggaaaagtaagcgacctcggaataacagatccgttcgatatgggatccgccatggcgcccgctgccgccgacacaatcaaacagcacctgcaggacttgaaccgtacggcggatgattatgatctgattttaacgggtgacctttcaggcgtcggctcgccgatcgtgaaagatttgctcaaagaagaaggctatcccgtgggaacgaaacacgatgactgcggtcttctcatctatacgccggaccagcaggtgtttgcgggcggaagcggctgcgcctgctctgcgcttgttacgtacacacatatttttaatcaattaaaagcagggaccctaaacagggtactcgttgtcgcgacaggagcgcttttaagtccgacaatgatccagcagaaggaaaccattccgaccatcgcgcacggtgtggtatttgagcgggcgggaggtgcatcataaatggaatatctgttggcttttgtttgcgggggaattatatgcattatcggtcagctgctgcttgacatttttaaactgacacccgcccatgtgatgacaacttttgtcgttatcggcgccttgttagatgggttcggaatatatgacaaatttatcgaattcgcgggcgcgggcgcgacggttcccatcgtcagcttcggtcacagcttattgcacggcgccatgcatcaagctcacgagcatggatttatcgggatcgccatggggatttttgaacttacttccgccggtatatcttcagcgattttattcgcatttcttgtagccgttatttttaaaccgaaaggataatgcctgatgacgaaacggaaggtcattcttgtgacagacggggacgtatacgccgccaaaacaattgaatatgccgcggaaaaagcaggcggacggtgtatttcccaatcaaagggcaatccgtcaacgagaagcgggcccgaacttgttcagctgattaaagccgcgccgaatgacccggtgtttgtcatgtttgacgattcaggcctgcaaggggaagggccgggcgaaacggcgctgaaatatgtcgcctcacatcaggacgttgaagtgctgggggtgattgcggtcgcttctaagacccatcaggctgaatggacgaaagtcgatgtctccattgaccgtgatggagaagtgacggagtttggcgttgataaaaccggaatgagagaaatggacgagcacagaatgaacggagatacggtgtattgtctggataaattggacattcccctcattgtgggcatcggcgacataggaaagatggggagaaaagatgacatatccaaaggctcgccgatcacgatgaaggcggtcgaattcattttagaaaggagcgaaagccatgccggaaaaaccggaaaacatgatcaaggtgtaccgggatcctagaaaaaatgaacaattttttaaagaccgcgtcggtatgggaacgagctatgatgtcggcgtccgcaaagttcgagtattagaccgggaagtccagatttactttgtcaacggattaaccgatactttgtttatcgttcatttaatggaacagctcgtcgacatcaataattatgacgagaatgcggatgaagcgattgacgttgttgaaaacaggcttgtcaatcagcaggtccaaaaagtcaaaacgctcgacgaagtaacggatcaggtgctttccggacttgtcgccgttatcgttgaagacgcgggcttcgcctttatcgttgacgtcagaagttaccccggacgcacaccagaagaaccggatacggaaaaggtcgtccgcggagcaagagacggttttatcgaaaatatcgtcattaatacagcattgatcagaagacgaatcagggacgaaaggctccgcgtcaaaattacgaaagtcggcgagcgctctaagaccgatcttgcgattgtgtatatagaggacatcgcggacccggaccttgtcagcatcgtcgaaaacgaagtgaatgcgattgacattgacggattgacgatggctgataaaacggtggaagaattcatcgtcaaacagggctacaatccgtttccgatggtcagatacacggagcggccggatgtggccgccaatcacattttggaagggcacgtcatcatcgtcgttgatacgtcaccgagcgtgatcataacgccgacaacgatttttcaccatgttcagcatgcggaagaatacaggcaggcgccttcagtgggaacatttttaagatggatcaggttcttcggtattatcgcttcaacggtcctgcttccgatctggttcctctttgttcttgaaccgtctcttctgcctgaaagattggattttatcggtttaaataaaaatacgcacatcccgatcattctgcaaatctttttggccgatttggggattgagtttctcaggatggccgcgatccatacgccgaccgctttatccaccgccatgggtctgattgcggcggtgctgatcggtcaaatcgccatagcggtggggctgttttcagcagaagtgattctgtacgtatcgatcgccgccatcggatcatttaccacgccgagctatgagctcagtctcgccaataaaatgatacgcctcatcttaatggttctcgtggccattttccaagtgaaaggctttgtgataggctttacattgctgctgatcataatggcgaatatccgctcgtttcacacgccgtatttatggccgtttttaccgtttaacggcaaggcgctgtggcaggtgctcgtccggacgacagtgccgggagccaaagtcaggccgagcattgttcacccgaaagaccgtcaaaggcagccaagcggttcataatcgcattgaaaccgacagaagattatgatattgtatgtcttaacttatacgggacttgtataaggacagctcaaaagaagctgtccttttcacccatatgcggatcagaaagagggaatgagcattgttcttacatggcacaagcagacaaaacaaactaggtcatttggaaatcgggggtgtggacgcgctgtatttagcggagcattacggcacgcctctttatgtttacgatgtggctttaatacgtgagcgcgctaaaagctttaaacaggcattcattgacgcggatttaaaggcgcaggtcgcgtacgcgagcaaggcgttttcttctgttgcgatgatacagctcgctgagcaggaggggctctcattggacgttgtatccggcggagagctgtttacggcggttgcggctggttttccggctgacaggattcattttcacggcaataacaaaagcgaagaagagttgaaaatggcgctcgatcatcaaatcggctgcatcgtcgttgataatttttatgaaatatccttactcgcggaactgtgccgcaaatcagggcgcacaatggatgtgcttctgcgcatcactccgggggtagaggcgcatacgcatgattatattacgacgggacaggaagattccaaattcggttttgatctgcataacgggcaaatagaaaaggcgattgaacaagtattacagtcagaccatatccgccttctcggtgttcactgccacatcggatcacaaatttttgatacggcgggctttgtgctggccgcagaaaaaatcttcgcaaaactgaatgaatggagagaatcattcggctttgtctctgaagtgctgaatttagggggcggcttcgggatccgctacacggaggaggatgaacctcttcatcccgccgtttatgtggaaaaaattatcgaagcggtaaaagaaaacgcagcgctgcacgcttttgacattccggagatctggattgaaccgggacgctcgctcgtcggagacgccggaacgacgctttataccatcggttcgcaaaaagaagtgcccggcacccgtaaatatgcagcggttgacgggggcatgagcgataatatccgtcctgcgctgtatcaggcgaaatatgaagccgtatcggcaaacagaatcggagaacaccacgacaaaacggtatccatcgcgggtaagtgctgtgaaagcggtgatatgctcatttgggatatagatcttccggaagtgaaagaaggcgatcttctcgccgttttctgcacgggagcgtacggatacagcatggctaacaactacaaccgcattccgcgtcccgccgtcgtttttgtggaagacggcgaagcgcatcttgtcattagaagggaaacttatgaagacattgtaaaactggatctgccgtttaagacgggcgtcaaacaataaataaaaaagagaccggaacaatggcgtccggtctctttttgcattcagctgttagaacttgatccgctgtctcctgtgaatacagacacgatcgcattccaaatcgaagcgaagaaatcaatgactttttgaacaaagcttttgccttcatcggattgaatgaacttcgtgattttgtcttttgccttatcgagctggctgccgacttggccccaatcaatcttggcgtttttcattttattaaacaatgaaacgagctggtctttttgagcgtcagtcagtgtaatgttaaggtttgaagccgcatcatcgacctttttctcgattccttcttttgtatcgggcacaccgtttttcgcgaaatcatctttaatgtttgcgatgagcgcggaggcgtttttatccccgattttatccccgagatttgaagtggtgacaagctcttggttggcgacctgttttacatcttctgaaatcgctttgtctgatgagacttcatatgccttgatgattcccgttaatgctgcggtgcctgatacctcaaacggcgccgtcacgtatactttcgcatctttcacgcctgctgtcatcagggcgtttaagtacatttcatccgtgatggaatcgatattatgggtcttaacgtcaagaccggaccctttctttgccaccgtgatggatgatgaagagatggctcttgtgccgatttgggcattcgatatatattttcccagatattcatgttcttctttattcgtgaccgtcacttttgtcgcgttatcagggacatttaattcgtcaagcactttctgacggttttcgtttgacagatccgcccccagtgtgacgatgacatctccgactgcggcatcggccaggctgattttcggtattgtgcacaatacaacggccgccgccagcaatccaatccacatttttttcaaagcggttaacctccttcttttcacaaatgccgttttgaagcggtttgtgagggcctgcgtgaagcagttccgatacatagacggctgtgaagctgttctggtttcattttctttctgcggaagcggggagattcgttttccggctgaaggtgtggtataatagccgcgaaaagaagagcagaggcctcttccttcaaaagaatatcaaaaagaaagccggcttacaattgaaattcatattgaagaaggctttgacaaaaaacaatacggaagtaggaatgagaatgaaaactggttacatcgaaatggaaaacggcagcagaatcgaatttgaactttatccgaatgaagcgcctaatacagtcgctaactttgaaaacctggcgaatacgggcttttatgacggcgttattttccaccgcgtgattccgggctttgtcagccaaggcggagatccgactgggacaggcatgggcggaagcggaaaaacgatcaaatgtgaaacagaaggcaatccgcataagcacgaagccggttctttatcaatggcgcatgccggtaaagacacgggttcaagccaattcttcatcgtacatgagccgcagccgcatttaaacggcgttcatactgtattcggaaaagtgacaagcggtttagagcatgcgaaaaacatgtctaacggggacaaaatgaaagaaatccgtgtagaaggataatcacggaaaatccgcctttttcaggcgggtttttttatgtatatgaaaattctcatgtgtaaatcatgaaaaaatacatatatgaacggtagcagttcctctggtatagtgataaagaccgattacaacaatgaaaagaggtagaaacgttggttcaattggcaaccgttttatttgtcattatcattctcgcacttataatttggttcagggtgaaaaaggggaacaggccgattaaaggcggcggcttcggcatcattcttccgcttttaattatcgccgtcatttttacattcagcatcagccagctcatgaatatcccgggaaagccgtttcattttcccgctctttgggagctcgccatcgccggactgttaggcgcggtattcggcgtcatcatgctgtcgcaaaccgcctatgaaatccgggaagacggctttgtctactccaagcggaataaaaactttaaatatgtcattatcgcgattattgcgatccgtatcgcgctcagccaatatttcaaaaacattgacgcggcggaattcgccgttttaacgatggaacttgcttttgtgtatttgtgcatttggcggatcggaagcttcgtgaaataccgtaaaatcagcagatccggcttataaaatgaaaaaaatggatgaggtgcggggcttatttgccctctgtgcagggattcatggtaaaataaaaacgaccatggctaatgggaggaaatcacttgaaatcagaaaaagaaaaaacttctaaaaaaagcgccgtacttgattgggcgaaagccattatcatcgctgtcgttctggcactgctcatccgaaactttttatttgccccttatctcgttgatggaagatcaatggatccgacgctgcatgatcgcgagagaatctttgtcaatatgacggtcaaatacataagcgacttcaaacgcggccagatcgtcgttctgaacggagaaaatgagcactatgtcaaacggattatcggactccccggcgacacggtgcaaatgaaaaacgatcagctgtatatcaacggcaaaaaagtgtccgaaccgtatttagcggcaaacaagcacaaggcgaagcaaggcggctatgaccggctgacagaagacttcggcccggtgaaggtgccggacgacaaatatttcgtcatgggtgataaccgcagagaatctatggacagccgcaacggcctcggtctttttacgaaaaaacaaatagcgggcacatcaaaattcgtcttcttcccgtttaacgaaattcgcaagacgaaataaaccgtacaggcagttttcttcatgaggaaaactgctttttttatataaatttatctttccaccctcaaaaacagaacataaattcgtatatctatttaatagatagaaagttttacagatacatgaaacatcttccctttatgaaacgttatatgaataactcacgcagggaagaacggttttctattcatgaacaaaaggaatatgacatagtaatgaatagattgatacgggctggaggtagaaaaatgggaagaattaaaacaaaagcagccattttacttgtactgctgctgttattagcgggcggttatatggtcataaacgatattgaactgaaagacgtgccgactgcaatcggacaaaccctgtcccaggaaaaagaagaatatacagtcaaaacatataaaattacgaaaatcgaaggaactgagtaccacggtacggcagaaaacggcacaaaaattatttttaacggcgacaagctgaagcaggatctctccgatgtgaaaaagggagataagattaaagcgtatttcagcaaatcaaaccggattgacggcttattgaaggtcgtcaaagtgaacgaataaataaaggcgccttttatgggaaaagggcgctttttatttttctgaataattaggtgcaaattcattgcgcctgccgcaaaggatgttataatagcggataaggacaaaaaaatattgattgtatccttcggggctgggtgaaaatcccgaccggcggtaataaggcgctttgcgctttacagcccgtgacccgtatgcatctgtatacggtggattcagtgaaaagctgaagccgacagtgaaagtctggatgggagaaggatgagagaagctatgcaaaaaataaacttactgtatagtcttatttcctatggattaaaactggcgaagccccgaactgtgtaaacattcggggcttttttgacgccaaattgcgtggaagaagggagggataacgatggaagaatattatatgaatacggcaatagaacttgccagacgcggtgaaggacagacacagtccaatcctcttgtcggcgctgtcgtcgtcaaaaacggacagatcgtcggaatgggcgcccatttgcaatacggagaagcgcatgccgaggttcacgcgattaatatggccggcagacacgtaaaaggcgccgatttgtatgtgacgctggagccttgcagccattacggaaaaacaccgccatgcgccgaactgataataaaatcggggataaaaagggtgttcatcgctgtgaaagatccgaatccgcttgtagccggaaaaggcatcggaatgctggaagcagcgggcatcgaagtgaaaaccggacttctcaggcagcaggcagaagagctgaataaaatgtttcttcacttcatgcggaccggacttccgtatgtcaccttgaaagcggccgcgagccttgacgggaaaacagcgactgaaaccggtgacagcaaatggattacatcagaggcggcaaggcttgatgcccagcaatacaggaaatcgcatcaaagcattcttgtcggagcaggcacagtcaaagccgataatccgagcctgacctgcaggcttcctgatgcggtgaagcagccgatcagagtgattctcgatacaaagctgaccattcctgaaacggcaaatgtgctcactgacggcgctgcgccgacatggatatttacggccaaaggtgcagacgtgcaaaagaaagaccggctgaccgcactcggaataaaagttattccgctggaaacagaccgcattcacgtccctgaggtgctcagcattcttgctgaaaagggcataatgtccgtttatgtggaaggcggagcatccgtacacggaagttttgtcaaggaaggctgtttccaagagcttcatttctatttcgcccctaaattaatcggaggaacgcttgctcccagcttgatctccggtgaaggttttcaatcaatgaaagatgtcccccatttacaattcacacaaatcacccaaatcgggccggatataaaactgacggccatacctaaagatggaaaggatggtgacgatgtttacaggaatcgttgaagaaacaggcacgatccaagcaatcaaaaagacaggcctttccatggcattaaccatcgccgcttcaaaagtgacaagtgatgtgaaacttggcgacagcattgcggtaaacggcatctgcctgaccgtaaccggattttctgacaatcaatttacggttgatgtcatgccggaaacagtgaaagccacttcgctgaacggcttgtcaaaaggcagtaaagtaaacctggaaagagcgatgtccgccaacggacggttcggcggccactttgtatcagggcatgtggacggaacggcggaaattacgcggatcgagaaaaaaagcaacgcggtctattacgatttaaaactttcgccggaattgacaaaaacgctcgtattgaaaggttcaattacggtagacggcgtgagcctgacgattttcggtttatcagacgaaagcgtaacggtatccatcattccgcataccatctcagaaacgatttttcagacgaaaacagtcggatcgaccgtaaatattgagtgtgacatgatcggcaaatacttataccgctttttgcacaaaacagaacaaacgaaaagcaatcaaactatcacggaagcctttttaagcgagaacggcttttagaaaggaagatcgatatgtttcatccgatagaagaggcgttagaggcgctgaaaaaaggtgaagtcatcattgttgtcgatgatgaagacagagaaaacgaaggagatttcgtagcgctggctgagcatgccacgccggaagtggttaattttatggcgacccatgggagaggcctgatctgcacgccgctgtctgaagacatcgccggccggctggatcttcacccgatggttgatcataatacggactcacatgagaccgcgtttacggtcagtattgaccacaggctgacaaaaacgggcatcagcgcgcaggaacgatcctttaccattcaggcgctgttgaacgaagaatctgtgtctgacgattttcagcgtccgggccacattttccccttaatcgcaaaaaaaggaggcgtcctgaagcgggccggccatacggaagcagccgttgatcttgcaaaagcctgcggatctcagggggcgggcgtcatttgtgaaattatgaatgaagacggcacaatggccagagtgccggagttagccgaaatcgccgaacgccaccagctgaaaatgattacgataaaagacttaatagagtaccgttacaacattacggcacttgtgaacagagaagttgatattacgctgccgactgacttcggcacgtttagagtttacggatatacaaacgaggttgacggaaaagaacatctcgcctttgtcatgggggatgtcctgtttaacagcgaacccgttcttgtcagagtgcactcagaatgcctgacgggcgatgtgtttgcatcccatcgctgtgattgcggacctcagcttcatgccgcgcttgcgcaaattgctgaagaaggccgaggcgttctattgtatttgcgccaggaaggcagaggaatcggtttaatcaataagctgaaggcgtaccgattgcaggaacaagggtatgacacggttgaagcgaacgaagcgctcggctttctgcctgatctgcgcaactacggcatcggcgcccagattctccgcgacttaggggttcagcatatgaaacttttaaccaataacccacggaaaatcgccggcctcgaaggatacggtctcagcatttcagaacgggtgccgcttcaaatggaagcgagtgagcataacaagcaatatttacagaccaaaatgaaaaaacttggacatctgcttcatttctaaaaacaaatctcacaaaaaaggatggataacatatgaatatcatacaaggaaacctagtaggaacaggacttaaaatcggaatcgtcgtcggcagatttaatgaatttataacgagcaagctgttaagcggagcggaagacacgttgcttcgccacggtgtagaatcaaacgacattgacgtcgcttgggtgccgggagcgtttgaaatcccgtttgcggcaaagaaaatggcggaaacgaaaaaatacgatgccgtcattacgctcggcacggttatcagaggagcgacaacgcattatgactatgtctgcaatgaagcggcaaaaggcattgcccaggcgggaacggcgacgggcgtcccggttatcttcggcatcgtgacgactgaaaccattgagcaggccatcgaacgagccggaacaaaagcaggaaataagggagcggattgcgcggtatctgccattgaaatggcaaacttaaaccgttcatttgaataatttgttgaaaagcgtttaaaacagcggcgaaaatgatataatgtgaggaaacggatcgcctttatgtatccgtttgataggacatgaatggacattttggatatagaggggtttttatgttaattcgttataaaaaatcgtttgaaaagattgcgatgggtcttctgtcatttatgccgaatgaaaaagatctcaagcagcttcagcagacaataaaggactatgaaacggatactggccgccagctctttctttggaaagaggatgaagatatcgtcggagcgatcggagtcgaaaaaaaggactcagaagttgaaatccggcatatcagcgtgaatccttctcaccgccatcaaggaatcggaaagcaaatgatggacgccttaaaacgtctgttcaaaacggaggcactcgttccgaatgaattaacgcaaagcttttttgaacgctgtcaacatcaaaaagatcaggatatctcatataataactgacaaatgctcccggaatcttcacggtttcgggagctgtttgatatagaaaaagcagggctgaccgtcagcctctgcttttttttcttctctcaatttcccgttcgcgttccttaatgacatccgtcctgtcccgcaggcggtgtttatgaataagaaaggtatctgatacgccgtcttgcccccatctatagccctttcggcggcattcggcaagacatgcttctttcagggcttcatctgtaatcggcagcataacacttctgtaaggcaggcccgcttctatatcgtctgacagcgtttctatcagctcaatcagtttcggatggctgagaccgagagaacagaccgcctgcttttcagaccgcagaatacgtaagctgttggcaatcagccgtttcgccccggcttcatttcccctgcgctggtgatacagagcgacggcaagctgaatcaggccgacccaatgaatgctccgcttttcagccgtgctttctttccaatattcctctaacagttcatgacactcaaaataatctcttgatgcgtgaaattcggccaaaaagccgatataagctttaggatacaagccgcttcctccttttatgctaaaaccagtgtaccacagcgctatgaaaaggaaaaaagagcggcttggtgcctgaagcctgaggaactagcagatgtaagatgctcctacgacaacgagcaaaataaacagaacgacaattaatgcaaaacctccgccgaaacaagctccgctcatgtgaaatcagcctccctttgtttcaagtttacacggctatcatatgtgcatccgcctttaaaggtataggcgtatatcttctttttcagtattttctaaataacggaggacgtgtataaaagtattggacgagagcatttcggtggattatactaaagggtagccagtttttccggcaatgagagtgatattgaaaatggtgagataatggtagaatatcaagtgaaaattgatacgtttgaaggcccattggacctgctgcttcatctgattaaccgtcttgaaatcgacatatacgacatacccgtggcaaccattactgaacaatatttattatatgtacatacaatgcaagagcttgaacttgatgtcgccagtgaatatctggtcatggcggcgacgcttctcagcattaaaagcagaatgctgcttccgaaacaagaggaagagctgtttgaagacgaaatgcttgaagaagaagaccctcgggacgagctgattgaaaagctgattgagtatagaaagtataaaaccgctgcgaaggatttaaaagagcgggaagaagaaagacaaaagtcatttacaaagccgccgagtgatttaagtgagtatgcaaaagaaatcaaacataccgagcagaaactgtcggtgaccgtttatgacatgatcggcgcgtttcaaaaggtgcttcagcgtaaaaaaatcacgcggccgaaagaaacgaccattacaaggcaggaaataccgattgaagacagaatgaacgaaatcgtaaaaagcttaaaaacggcggggagaagaataaacttcacggagctttttccttctcggcaaaaggaccatctcgtcgtgacgtttttagcagtcctggaactgatgaaaaatcagcagattatcattgaacaggaagaaaacttttcagatatatacattacggggagtgaatccattcatggcgcttgatatcgtgaattggaaagcgattgtggaagccttgctgtatgcggcgggtgatgaagggctgaccaaaaagcaattggtgacggtgcttgaaatagaagaagcggaactggccggaatcatgaaagaagtggccgctcagtacaaggaagacgacagaggcatcgagcttaccgaatatgcggatacgtatatgcttggaacgaaaaaagaattcgtgccttatttgaaaaaactaatcgaagtgccgtcaaaagggctgtcacaggcttctttggaagtgctggcgatcgtttcgtacaagcagccgatcacacgggcggaaattgaagatatccggggcgtgaagtctgaacggattctgcacagcctcgtgtcaaaagcgctgctgtgtgaggtgggccgcgccgacggtcccggccgggcgattttatacggcacgacaccggtatttcttgaacaattcggcttaaaaacattggaggagctcccgccgcttcctgaaaatgcggaggaagacgttctccaggaggaagccgatttattctttgaaaacttcaatcaaacttttgaggatattaaataataatcgtttttcatcatacgatagtagggaaaggccattgatgaatgacgcaaatgacgacgtacaagagaggaaggaaacggacggaaatgggaaattcgattgtgagggcccatactgaagaaactggtgaatttttagccgaggttgtcacgatggtcagcagctatttaaatcatacaacattgccggagatgcgggctcaaggagaggcggatgaggcatactgccgcgacgtgctcagtgtgctgaggaggatgaccgtcttttgcgaaggcgcccaggaagcctgcaggcggcttttaatgcaggagccgtttcatgaggtgagagcggaaaaaacgctgtataaagtgtatcatcagtgcgtggaagagtttttcatgccgaaaaaggatacatggtacgaaaacagccgcgccgcttatacaggccaaagcgcgattgaattctaccagcaagtgccggattcgctgcggagccttctgctttcgctcagcagtgaatttctgcgcatgcgggaagaattagcgcaatatgaagcatcaggctcaaatatggcatcagtcagataaaaactcttccttttgggagagtttttttatgtgaaagtgacgcaattggtattcataagtcatggacatgcgcataaacttgtacaaacccacaacaaggacgtgagcattcatgcgctttctcaaaaaagctgccgtatttcttttgacttttgttattcttttttccattacagacggcaatacggcacatgcccaaatacatgtcagcgcaaaaagcgcgattataatcgacggagcatctggcagggtgttattcgccaaggatgaacatcataagcggcggattgcaagcattacgaaaatcatgacggcggtgctggcgattgaatcagggaagatggaagagaccgtgacggtttccccgaatgccgtaaaaacggaaggctcagccatttatcttcagccgggacaaaaagtgaagctgaaagatctcgtatacgggcttatgctgagatcaggaaatgacgccgctgcagcaatagcggaatatgtcggcggaagccttgacggttttgtatttatgatgaacaaaaaagccgagcaaatcgggatggaaaatacaaaatttcaaaatccgcacggactggacgaccatgaaaatttatattcaacggcgtatgacatggcgcttttgactaaatacgcgatgaaaatcaaggaataccggaccgtttcaggcacaaaagtgtataaggcggaaacgatggaccgggtatggaaaaataaaaacaagcttctcacagggctctaccgttacagcacaggcggaaaaacaggttacacaaaaatcgcgaaacggacgctcgtctcgacggcctcaaaagacggtacggatctcatcgcggtcaccataaatgatccggatgattgggatgatcatatgaatatgtttaattatgtctttgatcactataaaacctatgtcgtcgccaaaaaaggcggcattccgaagctgaaaaagacgttttacggaaagcgcgcttttattgcccgggatgtcaaatatttgttaaaagaggatgaaatcgacgatgtaaaaatccgcacaaccttaataaaaccgaaaaaagcctggaaaaaggacgcctctctcattcctgatgtcgtcggccggatgactgttatgcatgatgggaaagtgatcgccaagattcccgtctattatgaaaacgagcgccataaaaaaccgaaaaagcatttcattgagacgtttacgagcctgtttatgagcgcggcgggcggttcgtcatggtcaatttaatctgggtatgtctgacggtaatcggacttgtctttgcgatgtttaacggtaccttgcaggatgtgaatgaagccgtttttaaaggagcgaaagaagcggttacgatctcgttcggattaatgagcgttctcgtgttctggctcggcctgatgaaaatagccgagcagtccggccttttggatatattcagcagaatgtgccgcccgtttatttctaagctgtttcccgatattccccctgatcatccggcgatgggatacatcttatcaaatctcatggcaaactttttcggactgggaaatgcggcgacaccgctcggcattaaagccatggagcagatgaaaaagctgaatggaggtaagtctgaggccagccgttccatgattacctttttggcggtaaatacttcgagtattacattgataccgacaaccgtcattgccgtgcgcatggcttactcggcgaaatcaccgaccgatatcgtcgggccgaccatcttagcgactttaatttcgggaatcggcgcgattttcattgaccgctacttctggtaccgccgcaaaagaaaagggaggtaagcgaatggaaatggtgaattggctgtctttagccatgattccgattattatcgccggtatattgatatacggcacgatcaaaaaagtaccgacgtatgaatcattcgttgaaggcggaaaagaaggaattgagattgcgttttccatcattccctatttggtcgggatgctggtggcgattaccgtattccgggcctcgggcgcgctggattttgtcatggggctgtgcaagcctttctttacagcgatcggcattcccgcagaagttgtgccgcttgctctgatccgcccgatttcggggacggcggcgctcggcatgacgacagatctgatcgccgtgtacgggcctgattcatttatcggcaggctggcttcggtcatgcagggatcgactgacacgacgctgtatgtcctgacggtgtatttcggggcggtcggcatcaaaaaaatgggggatgctttaaaggttggtcttcttgctgatttgatcggggtggttgcatcaatcatcatagttacgttattatttggaagcgcctgaaatcaggcgctttttatatatcaaaataactctccttgaaaaagcttgtttgttcaaggggaaaaaagtaagattatacttgaggtgaacgacatggaaagactgcaaaaagttattgctcatgccggcgtggcatcacgcagaaaggcggaagagctgataaaagaaggaaaagtaaaggtgaatggaaaagtaataacagagctcggcgtaaaagtgaccggttctgatcagattgaagtaaacggattaaaggtggagcgggaagaacccgtgtactttctgctttataaaccgagaggagtgatctcagcagctgatgacgacaaagggcggaaagtggtgaccgactttttcaaagaagtgccgcagcgcatttatccgatcggcaggcttgattatgatacgagcggacttttattgctgacaaatgacggcgagtttgccaacaaactcatgcatccgaaatacgaaattgataagacgtacgtcgccaaagtgaaggggattccttccaaggaacttctgagaaagcttgagcgcggcattcagcttgaagaaggcaagacggcgccggccagagcgaaaatgctttccctggacaaaagaaagcagacgagcatcattcagctgacgattcatgaaggacggaacagacaggtccgccgcatgttcgaggcgatcggtcatgacgtgctgaaactaaaacgtgaagaatacgcatttttagatttaagaggcctgcgcacaggagacgcaagagaattgtcgccgcatgaggtgaaaaggctgcgggctttagctgaacacggtaaaaacgctttctaattttcacataaccttcaaaaattacaaaacgtgttgatgatataattgaatggatttgcaggcaggggaggggagcagtgtacaatgaacaaaaaacggcggcgtttattcattcggaccggcatccttctcatcttactctgcgcgctcggatataccatctataatgctgtttacacaaacggcgagcgtatatctgaggggtccaaagccccgaatttcgcgctgaaagatacagagggcagactcatagaactgagtcagttaaaaggaaaaggcgtttttctgaatttctggggaacgtggtgcgagccgtgcaagcaggaatttccctacatggagaatcaatacaagcattttaaagacctcggtgtcgaggtggttgcggtaaatgtcggcgaatcaaagattgcagtacataattttatgaaaacatacggcgtcaatttcccggttgcgctcgatactgaccggcaagtgctggacgcgtacggcgtatcacctattccgacgacatttttgatcaatcccgacggaaaagtcgtgaaagtggtgaccggcacgatgacagaacgcatggttcatgactatatgaatttaattaagccggaggcgtcttcatgaaaaaggtcaaatgtgaatgcgggcacgtgaatccagccgggacggttttgtgcgagtcgtgcgggaagccgcttgatgatcaaaaatcgctgcttgcggatatgcggtacgacggcagcgcaaggcgttcgcaaacatataacaaaacaatcgtagataaggtatggaacttcttttcttccgtaaaagtcggaatatggctgatcgtcattactctggcggcctctgctttcggcacggtttttccgcaggaagcttatctgccgccgggcgcccagccggatacatattatgaacagcagtatggcataatcggtcaactgtactatctgctgggatttcatcacctgtacggctcatggtggtatatgctcctgatcgcatccattggcatatcactggtcatctgcagcctggatcgggtgattcctttgtacagagcgctgaaaaatcaaggagttcggcggaatccgatctttttgaagaggcagcgtctatacagccggacagaaaccgagctgagcggggatgcggctgatggcatcagaacacgattgaaaaaaaagcattatagagtgcgagaacaagagagaagcattctggcggaaaaaggccgtttttcaaggtgggggccctacgtcaatcatatcggtctgatcatttttctgatcggagccatgctgagatttgtacccggtatgtatgtcgatgaaacgctctgggtccgtgaaggcgaaaccgctcagatccccggcactgatggcaagtattacttaaaaaacaaccggttcacgatgcagacatataacaaagacactgagaaaaaagtattcgccgacgccattgacagagccggaaacggaaaagtcgccaaatccttcacaacggacgcggttttgtacaagagggaaggcgacattgtattcggcgaaaagccgaagcttaaaagagtcaaagaaaacaatatccgcgtcaatgaaccgctgcgctttgactcctattctgtgtatcaggtggactataaagaaaaccagctcgatcagatggtatttcagctgatcgaccaaaaaacaaaacagtcattcggcaaactgaagatcaatcttcttgatcccgacacggactatgatcttggtaacggttacaaagtgcagatcgccagttatcttcctgatttttattttaacaaggacggagaaccgagcacgaaaacgaaggttcctaacaatccggcttttgtctttaaaatcacggctcctgacaagccgaaaggggaaaaaagttttgttgcgattcagcagactgttgaaggttccgaaagtaacaagtacaaattaaaattcgaccatgtggaaacgaaaaacattacaggactcaccgtcagaaaagacttaaccttatgggtgcttgccgtcggcggagcgatctttatgatcggcgtcattcaaggaatgtactggcagcacagaaggatctggatcaaaacaggtgatcatgaagtgcttgtggcgggacatacgaacaaaaactggttcggtctgaaaaaggatatcgaatttgttcttagcgggaccgggattcaagagccggccgatcaaaaagaattggccaaaaatcaggcctagtgaaaaaggagtggtgtcatggcggagctgagcgcaaattttctttatgctgcctttttgatttatttaattgccgtcccggttttcggcggcgccatccggggaacaaaaggtgctaaggacggtaagggccgctggtcggctatcggaatcacgttaaccattttcggatttctttgtcatctcggctacttcattgcgagatggtcggcaagcggacatgcgcctgtcagcaatatgtttgaatttacgacgtcattcggcatgatgcttgttctcgcttttattattatttactttatttacagactgccttcattaggcatgttcacattgtctatcgcgcttttgcttatcgcatatgcaagcatgtttccgacagacattacaccgcttattccgtcactgcagagcaattggctgtacattcacgtcacgacggcggcgctcgggcaggcgattcttgcgatcagttttgtagccggcgtcattttcctgttaaagcatgtcgaccaatccagaccgggcaaaaaaacgttctggcttgaagtcatcatgtttatactcgtgacgaccgtggcatttatcgccgtcacgtcggcattccggctggcggactacaaagctgaatttaattgggtggataaaaaagaagccaaaagcgtcatgatatatgatatgcctgcgcttgtcggcccgcatgagggagaactgcttacggaaggcgcaatgaagccgcttattgagcttccggccattttttcaggcagaaaggtcaatacggtgatctggtcgtttggcgcaggtctcgttttatacggtgcgctcaggctgatattcagaaagagaatcagcgctcttatcagcccgctcgtcaaaaatgtgaatctggacttggtcgatgaagtcggctaccgcgctgtttccatcggttttccggtattcacactcggcgcgcttgtgtttgcgatgatttgggcgcagcttgcatggacgcgtttttggggctgggacccgaaggaagtatgggcgctgatcacctttttattttacgcagcgtatttgcacttgcggctgtcaagaggctggcatggcgaaaagtccgcgtggcttgccgtcatcggcttcgccattattatgtttaacttgatttttgtgaatctcgtgcttgccggacttcattcgtacgcatagatgcaaaaagccgatacagttctcaagctgccgcacagtttgttaaaatgaaagtaacagaaggaaagcagggggaaaacgatggatcaaacaaatgaaactaaaatattagtagtagatgatgaagccagaattcgacgccttttaagaatgtaccttgaacgggaaaactatgtgattgaagaagcggaaaacggcgacgaggccattaaaatggggctggcatcagattatgatctggtgctcttggatttaatgatgccgggaacggacggaatcgaagtatgccggcagctcagagaaaaaaaagcgacgccgattatcatgctgacggcaaaaggggaagaagccaaccgcgtccaggggtttgaagcgggtacggacgattatatcgtcaagcctttcagcccgagagaagtggtgcttcgggtaaaggcgcttttaagaagggcttcccaaacatcttatctgacagccaataccccgacaaaaaatgtgctcgtcttttcgcatctatccattgatcacgatgctcacagggtgactgcggacggcacggaggtgagcctgacgccgaaggaatatgaactgctgtacttcctggcgaaaacaccggacaaagtgtacgacagggaaaagcttttaaaagaagtgtggcagtatgaatttttcggagacctcagaacggtggacacccatgtcaaacggctccgtgaaaaattaaataaagtatccccgggagcggcgaaaaaaatcgtcaccgtatggggagtcggatacaaatttgaggtaggcgctgaatgaagttttggaaaagcgtagtaggaaagctttggtttaccattctttcactcgtgttaattgttttatttattttaacggtgctgcttctggaatttatagaaaattaccacgttgaagaagcggaaaaagatttaacgcagcttgccgataaaattgcggtcataatagaaaatcatgaagaccagccgcttgccagatccatcacgtgggaactggcggacaatttaacgagcatcgcgatcattcaggatgataaacatgtctggtattcgcccaatgacgataatcatttatcctctattacattagagcagatcaaacatgaccgggatctgcacaaggcgctgacagaccgcaaaaaagtaagcaaacgcgcggtgcccaacaatgccggttcggataacgaacggctgatcgtcggagtgccgtatgaaaaagacggcaaaaaaggcatggtctttttatcccaatcgctgcttgccgtcaaagatacgacgaaacatacgacacgctatatttttcttgcggcgggcattgccatcgtcctgacaacgtttttcgcgttctttttatccagcagggtgacatatccccttcggaaaatgcgggaaggcgcccaagacttggcgaaaggaaagtttgatacaaaaattccgattctgacccaagatgaaatcggggaactggccattgcctttaatcagatgggacggcagctcaattttcatattaacgcgctgaatcaggaaaaagaacagctgtccaatattttaagcagtatggcagacggagtcatcaccataaatattgacggcaccattttggtgaccaacccgccggccgaacgttttctgcaggcatggtattatgagcagaacatgaacattaaagaaggagacaaccttccccctgaagcaaaagagctatttcaaaatgcagtgaacacggaaaaagagcaaatgattgaaatgacgcttcaaggaaggtcatgggttttattgatgtcgcctctttatgcggaatcacacgtccgcggcgccgtggccgtgctccgtgatatgaccgaagagcgcaggctcgataaattgcgtgaagacttcattgccaatgtcagtcatgagctcagaactccgatttctatgctgcagggatacagtgaagcaatagtggacgacattgcaagcaccgaagaggagaaaaaagaaatcgcacagatcatttatgatgaatctcttcgcatgggccggctcgtcaatgatttgctggatttggccagaatggaatccggacatacgggcctgcactatgaaacggtaaacctgcatgaatttctggagaagatctcccgcaaattttccggggtagcgaaggaaaaaggcgtttcgctcacagaagacatctcggtgtctcagccggagtgtgtctttgacgaagataaaatggaacaggtgtttaccaaccttatagataatgcgctgcgccacacggagtcaggcggaagcgttcatatcgcggctcagaccgtaaaagacggactgaaaatcgatatcaaagattccggctctggaataccggaagaagacctgccttttatttttgaacgtttttataaagcggacaaagcaagaacaagaggcagggcggggaccggactcggactcgccatcgtaaaaaatatcgtggaagcccacggcggctcaattgcggttcacagcagcatcgacaaagggacgacgtttacattttatattccgacaaaagtgcaggatgacgtctgaaattgacgaacaatcttgttccatacgaaacacccgcatgttctgcgggtgttttttatttgtttctcctttaaaaatttaagaatatgttaatataaattcccttccaaattccagtttctcgtaatatagttgtaatgtaacttttcaacgcatttttacgacaaaaaagtgaacggaggggtttcccatggaagaaacctttcagatattatatgatgcataccatcaagatttatatcaatttttattttatatggtaaaagataagtcgcaggctgaagatttgacgcaggaagtgtatatccgcgtcttgaattcctatcatacatttgaaggaagaagcagtgaaaaaacatggctgttatccatcgcacgccatgtggcgattgactggttccgcaagcagcagacgatcagacagcgtattatgggtacgtttgattgggatacacaagatgtcagagatcagcatttgcttccggacgaactcgccgtacagcatgaaaacgtccgggaaatttataccgcgcttgatcattgcaccattgatcaaagagctgttattatcttgagatttattcagggatattccattcaggaaacagccgccgctctccgcttctcggaaagcaaagtcaaaacgacccaacacagagggctcaaaatacttcggaaacagatggagcttttgagggaggagctaatggatgatgaagtcatattggaacgaagaaagagtagaggagttgttaagacaacttccggcggttagagatcatcgttcacccgaggccatttaccggaatattgaaacaggtaaaccgtacaggaaaaaaccggcccgaagctggatcggccccgccgcagccggcgtctgcgcattgtgcatcgctctgattatatctcctcatctgatgacaaacaaatcttccggtgatctaaccgctgacagccgccagactgaaaaagccagtcagtcagcttctgtcaagccgccggatcagaagacgttcgtcgtctcaaaccaaaacaaaaacaattacattaccttggcatttgccgattcagaaacatccgccgtcattccggtcagttttgaaaaaaagaagccggatgaatcggtttcagaggctttatccgaagcggaaaacctagaagtgcccgaatccttcctgtctgtgccgaaccttttggacggtgtgcaggtaacggcggataagaaggacttgcttgtgcaggtaaacggacggttctctatcgaatcagttgccgatgctgacttattgaaaaagatgctgaaagagactttgacatggagtccttacgagcggattaaattgaaaaaggttcaaaacggagccggacaggatttttataaatcttacggcatttccgctgagatgtccgtacataaacagacaaaccgggcgtatttttcttacagcgacagtctgggacaagagtatctcatcccgtctgaacaaacctattattcagtatatcaggctattgacgggatgaagacaacagacggaggctcacagaccgcgagcattatagaagcagatgcgattgcatcggtatcggaaagggaagacggtgagcagctgcggattcaattgtccgaaaaacatacggttgaagattcgctggaagggattttaatgatcgaagggcttctgttaactgcgaaggaattcggttattctgaggtgctgttcacacatgcgcatacaaagaaaatcggtaattatgatgtgacaaaacctatcgctgtgcctgccgcgcctaatccgcttccaagccattaaacgtaaaaaacccaaaacatatgaatgttttgggttttttgttggttacggaaggtcaatcagtttaacggaaacaatatcctgaattgaagtcagctcattgacgactttatcatctaaatgtttatcaaaagaaagcatcataatggcttctccgcctttttctttacggcctacctgcatggtagcgatattgatatcgttatcgccgaggatgcgtccgacgcgtccgattacaccagtcgtatcctgatgctggatataaacgaggtggccggcaggatttaagtcaatattaaagccgttcagttcaacgattcgttcaccgaagtgagggatatacgtagccgttaacgtaaatgtgctccggtctccggttacttttacgctgatgcagttatcatatcctgattcattggaggaaatcttctcgctgaagctgattccgcgttcttttgctacaccgccggcgttcacttcattgaccgttgagtctacacgcggttttaagaaaccggacagcaggctttttgtaataaatgatgtttcaagtttggcgatggtgccttcatattgaatcgcaacatctttgacgggttccttcatacattgtgacacgagacttccgattttatcagcaatttggtgataaggctggatttttttgaattcatcttttgtcatcgcaggcagattgatcgctgacatgacaggcagaccttttgcaaactgcagcacttcttcagaaacctgtgccgcgacattcagctgtgcttctttcgttgaagcgcctaagtgaggtgtggcgatcaccagcgggtggtcgggaagctttgattcaactggcggttccacttcaaacacgtcaagggcagcgcctgcgacatggccgctttccagcgcttccaaaagcgccgcttcatcaataatgccgcctcttgcgcagttgataagacggacgccttttttcgttttggcaatggtttctctgttaagcagtccttttgtttcctttgttaaaggcgtgtggacggtaatgatatccgcgctttcaagcacttcttcgaatgtccggctgtttacgccgattttgccggctctctcttcggttaagaaaggatcgaatacatgaaccgtcataccgaacgctctggcgcgctgggcaatctcgcttccgatccgccccagaccgacaatgcctaaagtctttccgtagagctccgccccgacaaaagccgtccggttccattctcttgattttactgagatattggcttgcggaatgtgtctcattaatgaagaaatcatcgcgaatgtatgctctgccgttgaaatggtgtttccattcggcgcgtttatcacgataaccccatgttttgtggcctcatcaatgtcgatgttgtctacgccgacaccggctctgccgacgatttttaaagaggtcatttttttaaacaattcttcggttactttcgtggcactgcggactaacagggcatcaaaggtatgtaattcatcttctgcatccgcgacgtttttttgaacaatttctataaagtctgattccatcagcggctttaagccgtcattgctcatcttatctgagaccaaaactcgaaacattgttagatttcctcctagtttagctgactaaatatctgataatttatcatattctcaatagagtgtcaatgtgtattgacgcagtaaaggagaaaaggaaaccgctgaatcagcttaaattgggcttccccaatattttatttaaatttgagcagttctctatacaattgcaatttgatcatatataatgtgaataaattcataagatcaatcttcggggcagggtgaaattccctaccggcggtgatgagcatcatgctctaagcccgcgagctgcttcggcggcaggatccggtgagattccggagccgacagtacagtctggatgggagaagatggaggttcagcagacgttttgatgctcatatcaaacgtttctttgccaagccttagtaagctcccgctttttaacaaaagcggtttttttattggggcgcaaaagaacctttcctcttttcgagagatttgatcgaaaaggagagagcattgtgaaagtaaaaaaattagttgtcatcagtatgcttagcagtattgcttttgtgcttatgctgttaaatttcccgtttccgggtctgccggattatttgaaaattgatttcagtgacgttcctgcaattatcgccattttggtttacgggcctgcggcgggaattgcggttgaagcgattaaaaatattctgcagtatatcattcaaggaagcatggcaggcgtacctgtcgggcaggcagccaattttatcgcgggaacgctgtttattctgccgacggcgtttatgtttaaaaagctcaattctgcaaaaggtcttgcggtgagcctgctggccggaaccgcggcgatgaccgtgctgatgagtattttgaactatattcttatcctgcccgcgtatacttggtttttacattcaccggcactgtcaaacagccagttaaaaacggcggttgtcgcaggaattctgccgtttaacattgtaaaaggcattatcatcaccatcgtctttacgttcatctttacgaagctgaaaccttggattgaacaaaaacgcaacatccaaacacaataaagattgaaagcgtccgctctgtgaaaacagccggacgcttttttgtttgtgctgatcggcaaaaaaataagactccggccgataacagccggagtcttattcaggacgaaaaagctcctctcacggggagggcttttttattcgtatttcagcgggtcgccttcgaacggttcatccgcaactttgattgaatcagtagggcatccttcaaatgcgtcaatcatatcttcttccagaacttccggaacttcgacgacgcctttattttcgtcaagcgtaacgaacgcaatgccttcatcatcataatcataaatgtctggtgccgcagctccgcaggcgccgcatgcaatacacgtatctttatctacaattgtgtactttgccatgaataaaacctcccagattgttcgtgttggaacaaatggtttaccttatatatttttaaatataacacctattcctcttacttattgtaatgatgttagtgtcaaatttcaacagaaaaatgattgagaatgcttatcacataagggattctctttagcacttccccctaaaagatgactttaaacgtcaaatttatatgaaaatctgttaaaataaaaagaaccaaaaaacgaaacttgtcacagaagaaatgtaggtgtgtttagattggcgataaactactttgataccgtggttctcgactgtctggacaaaatagacggcgaacggactccgagtgctgtgtttcatttattaaaaggaaaaaagtcgtctcaaaccattcaggatgccggcttatttcagatcgctaaatatttcggcatggcttcacagtgtgaacgcggcgatattgcggcttctttgcataaactcaccgaaagctcatacatcacagccggaaaagaagagggaacgtggaaagtgactgcgcgcggcgttcaaaggcttgaacgggcgtttgccgagcagccttggccgaagcactgccacggcgcgaattatcaaacgcctgccgtcaccctgtggaggcggctttccctgctcattcaagtcctgtcaaacaaagagcatcaatgcagtcaatatatcccggttaccaacgatgtgcagacgctgagatgggtcaaacggttcatgcggaaaaacagagatgctaaagagctttccgtccaaatgcatgacgcgctgtttcagcttctgcaaggcgtaagtgaacggcaggcgctaatttttgtctattctttaacttcattcaacagaatcggcaaaacgaataagcagctcgctctccagctgaacgaagatgaatggtatgtgtccgtccagttttggggagcggtacattatgttattcaatcgcttccgcaatgtgcatatcccgctctgcgcgagctgttgtccgatctgcaggcggaaagtgcgctgacacagtctgccagaaaaacctttgagctgttggaaaaagggtttccgattgaacggatcgccgcggtcagaaatttaaaaaccgccacaatcgaagatcatatcgtagaaatatcattgcatcagcctgcattttttatagaacagtatctttctgaagaggaacagcgtatgataacggcatttgcaaaacagcatcaaacgaataaaattaaacggattcgcgaaggaatgcagatgcgcttcagctatttccagatcaggctggcgctggcaaagacggtgaatcagcatgactgagctgcataaagctttatccaagtattttggtttgcattcctttaaaaaagggcaggaagagattatgactagcgtgctccaaaaaaaagatacgatcgccatgcttccgaccggcgggggaaaatcattatgctatcagctcccgggttacatgatggacgggctggtgctgattatttcaccgctcctttcattaatggaagatcaggtgcagcagctgaaagcgaaaggagaaaagcgggttgctgcattaaacagcatgctgaattccgcagagcggcattttattctcagcaacatcagcaggtataaatttctctatatgtcccctgaagccctttcttcaccttatgtactgaaccgtttgaaaaacgttccggtcagtttatttgttattgatgaggctcattgcatatcagaatggggacatgatttcaggcctgattactcgaagctcgggcctttcaggcaggcactcggaaagccgcctgtattggcgctgaccgcaacagcgacaaaagaaacactcagagacgtgacggatgtgctcggacttgagcatgcggtgcgtcatctttattcagtcaaccggccgaatattctcctggcggcagaacatttggcggataatgccgagaaaataagcaggctcacggagcttgccgaaaagcttgaaggcccgggtatcatatattgtccgaccaggaaatgggcggaagagcttgcggctgagctgaatgaaaaaacgggaaagcggacggattattatcacggcggaatggatacaggggacagaatcttgatccagcagcaatttatccataaccagcttgattgcatctgctgtaccaatgcgttcggcatgggtgtggataagtcagatatccgctttgtcattcacttttatcctccccaaacggctgaggcctttatgcaggaaatcggcagagcgggacgcgacggcagcccgagtgtcagtattttgctgagggcgcccggcgataccgagcttcagcagcagattattcagacagaaagcctgtctgattatgacctggaaggtattctggccgtcatacgggatgccggtacgggtgatgaacgaaagcttcgggacgttctgatcaataagggcgtccaggaaacacaggcgcgaacggccgtccatctgtatctgcaaggaaaaacaacaaaagagcagctgcaggaagaactgacataccgcgtggaaaagaagctgcgtaaaatgaatcgtttttcagcgttattagagcggaaagaatgtataagagaagcgctgctgtcttattttgatgaatcgtatgagcctgaaggtcaaaccggacaatgctgcaacagctgcggacttgatctggctccgtacgagcaaaaaggagaacgtaaaaatatggaacggtttgaagattggaagctggaattaggccggattttcggttcagagtctgcgggtgagttcagctgagacggcaaagcgaattgatccggcagctctcagaccgggagattgtgatgcagctgtatgccacccaattgctcatattggcggtttcagctgttatcggctttttcttttttaccgacattcacgattttttaaagctgtggcatatacgtgacgataatatcatatggtacggtgtaactcttgctgtccttgtcatttttgccgatcttgcggtgatgaaatggtgtccttcgcatttatatgatgacggcggcattaatgtattgctttttaagaacaggccggttttgcacattttgtttttgacgcttctcatttcgttcagcgaagagattttgttcagaggcgttctgcagacacatatcggcttatgggccgccagcttcatttttaccgtgcttcatttcagatacttggcgaagtggcttctgtttatgatggttgcgggcatcagtcttttgctggggcttatctatgaatggaccggcaatttattcgttccggttacagcgcattttattattgatgcggtatttgcctgtcagatccgttttcaatatgttaggaggggtttgcatgacggaaatgtcaagagttgaaagaagaaaagctcagctgcgtgccgagcagcaggttgccgcggccgcggatgaacaaattgaatatcttgaagacagcctcccgacaagacaatctgtaaaagaggagcgtaaaaaaaaggaagagcaggtgaaggaaaaaaccaaaacaaaaacgccgctgttcacttttctgaccgtcctgttcattatcgtaacaatcggtgtctttttcggtcttctttatatgacgaacagcagcagatttgacccgaaggactatgaagatgtcttcatagaccacagtgaaagcgcgcctgccgttattccgaaaggcgctcagaaagaaatgtcagaaaccgctcttttagaacaaccgaaaaaaaagtctgacgacaaagataagaaagaagcggctgcacctgaaaaaacgaaagaaaaaccaagtgaaaaaacacctgaaaaaaccgaaacaccctcagaaaaacaagtaaagccgacagacaccgaatacgcggagacaaaacagcagtctccgccgtctgtccgtgaaaaagcggctccggctgccgcgagtgatcaagccgggactgtcccgaaaaatgtacggaccgtacagcatactgtacagccgaaagaaacgctttaccgcatttcaatgaaatattataaaagccgggcgggcgaagaaaaaatccgcagctacaacggattaaacggaaacgacgtgtacaccggccaggttctgaacattccgctgtctgattaaaataaatgcatgttttcaccgcgtttttcatatagtgtaccaatgaaaacggacaaggtgtgaagcgcatggattctttatggaagcaattagaccgatttgctgacggaccgacgaaacaaatgcttcaggcgctggtgaaacggaaattaaaatacgaaaattatgccgcacaatgccgaagatggcagtgggcgtccctcgtttgtttttccctgatgtgcatactgctgatgtttaaaagctttaatgccccccaagcctctccgcagctgattctgcaggaaatattaggccatacggtttacttgtgctggattatggcttccgcttttgcgtattgcacttcttattattttaaaaaaaaggaagaaaaagctgagggtgaatttcataaactgagatgtgaaattatccaaaaaagcacggatttatggccccagcccgaaaaatggagggcgagagaatctgtttttcacttgatgaaacatcggtatgatatcaatctttattttgaaagcaaataaaatgaggcgttttccggaaaggatagaaacgtctttttttgtttgtccgtctaatgtaagacaatgacagaatggagagtgcgtttatgaagcttacagcgggaattctcggctcattggcgggagcggctgcggttatggcggccgttatgtacaaaacggcaaacggcagccatctgaaaacacatacatttacgcttgataaaatgaaggggatgaagccgctcaccatcttctttatatctgacgtgcaccgccgtttaattgatgaaaagcttctccgcgaagcggcaggttataagccggatgctgttttgctcggcggtgatttggcggagggcggagttccttacgccagaattgaagaaaacatcaaacgtctgacggctctcgcgcctgtcatgtatgtgtgggggaataacgattacgaggtcagccagcaaaaactgctctcacttttacgggcatataaagtgatcccgctgagaaatgaatcggttcagtttgcttataaaggggaaaccgttacgatctgcggcgtggatgatatcaggatgatgatggatgattacgattctgcaatcagatatacggatgctgacaaagtaaacctcctgctttgccataacccggacatccatgagcagatgagggagtcagacgggattgacgctgtgttcagcggccatacgcatggcggccaaatccgtttcggccggttcgggccgtacgaattgggcgggacgggaatggtaaaaaaagcgcattacctgatcagcaacggctacgggacgacaaaagttccgctgaggctcggggcgaaaccggagacgcatatgattacgctgtgcggaccggatgagccgtcttcctgaaacaaacccggccgctgtgataaaaaacggcattctgcttgtcttcccgctgtacacggtgtaaactgataacaaattaagaacctatgactcatttattcatatactgtgttatatgatttgtgtgcaagaagaggcaggagggaacattatgcggcttgagcgtctgaactataataagattaaaatctttttaaccctcgacgatctgactgatcggggactgacaaaagaagacctctggaaggactcgtttaaagtccaccagttatttaaagatatgatgaatgaagcaaatacagagctcggctttgaagcgaatggtccgatcgcggtggaagtatattctcttcaggcacaaggcatggttgtgattgtaacgaaaaatcatgacgcggacgcagaagatgacgaatatgacgatgattatatcgagatgcaggtcaaacttgacgaaagcccggatattatttatcagtttcattcgtttgaagatatcattcagcttgccggaagccttcaccgaatcgggattaccggcggcaccgtctaccactatgagaaccaatactatgtaagccttgaagacctcggctcccgttccgccgaaggcgtcatcgcggtgctggctgaatacggacacccggcgacaattacgatttacaggctccatgagtacggaaaactcatcatggacggcaatgctgtggagaccatccagaaacatttttcataaagaagatttgaaacggcagctgttttcagcggccgtctttttttaagcgaaataatggaaaaatcattgtctttcttctatgcacggagatattgaaggtgtatactagtcactgaaagggagcatgagagaaacagaagattttaggaggttaactcaaatggcagccgatcgattcaccggtcataatgaagaagacaaacatgatgtattaaaatcaacccaaaccgtaatacataaagctctggaaaaattggggtatccagaagaagtgtatgaactgctgaaagagccgctcagattattaacggttaaaattcctgttcggatggatgacgggtctgtgaaaatattcacaggctatcgtgcgcagcacaatgattccgtaggtccgacaaaaggcggcattcgttttcacccgaatgtaactgaaaaagaggtgaaagcactttccatctggatgagtttaaaatgcggaattattgatcttccttatggcggtggtaaaggcggaattgtttgtgatccgagaaatatgtcattcagagagcttgaaaggctgagcaggggatatgtcagagcaatcagtcagattgtcggaccgactaaagacgtcccggcacctgacgtatttacaaactcacagattatggcttggatgatggatgaatattcaagaattgatgaatttaactcacccggctttattacgggaaaaccgcttgtactcggcggatcccacggcagggaatcagcgacggcaaaaggcgtcaccatctgcataaaagaagcggccaagaaaaaaggtctcgatattcagaacgcgcgcgtcgtcgtacaaggattcggaaacgcgggcagctatctggccaagtttatgcatgacgccggcgcgaaagttgtcggaatttctgacgcgtacggaggtctttacgatccggacggtcttgatattgattatctgcttgaccgcagagacagcttcggaacggtgacgaaacttttcaatgacaccattacgaatcaggagctgcttgagctggactgtgatatacttgtcccggcggcgattgaaaaccaaattacagaagaaaacgctgaccgcatcaaagcgaaaatcgttgtagaagcggcaaacggaccgacgacactggaaggaacgaaaatcctgacagacaaaggaacgctgctggttcccgatgttctggcgagcgccggcggtgtaacggtttcttatttcgaatgggttcaaaataaccagggcttctactggagtgaagaagaagtcgaggaaaaactggaaaatatgatgataaaatcgtttaataatatttatgaaatgtcccaaaaccgccggattgacatgaggcttgcggcttacatggtcggcgtgcggaaaatggcggaggcttcgcgtttcagaggctggatataaaccaatcgtttgcataaacaaaaaaaatctcctatgataatataggagattttttatatgagtcgaaacttatgatggaaatgccaatcgcaggagttgaaggacatgacagaagaaaaagcaattataataggcggaggtccttgcggattatcggcggctatacatctgaagcaaattggcgtgaacgcgcttgtgatcgaaaaagggaatgtcgtaaacagcatttataactatccgacccaccaaacttttttcagttcaagtgaaaaattggagatcggcgatgtcgcttttattacggaaaacagaaaaccggtccgaatacaggctctctcttactacagagaggttgtcagaagaaaagagctgcgcgtaaacgcctttgaaacggtggagcgcgtaacgaaacaggaagacggccgttttcttgtagaaacatcaaaagaccgctacctcactccgttttgtatcattgcgacaggatattacgatcatccgaattatatgaacataccgggtgaagggcttcctaaggtatttcattactttaaagaaggccatccttattttgataaagatgttgctgtgatcggcgggaaaaactcaagtgtggacgcggctttggaactggtgaagtccggtgcgcgcgtcacggtgctctatagaggacatgagtactccccgagcatcaagccgtggattctgcctgagtttgaggccctcgtcagaaacggcacaatccggatggaattcggcgcttgtcttgaagaagtgacggaagatgaaatcattttccgctccggccgaaatgagacggtccggctgaaaaacgatttcgtatttgccatgacgggataccatcccgatcacggtttcctcgaaaaaatcggtgtgcagattgatgctgaatcaggccggccgtttttccgggaagaaacgatggaaacaaatgttgacggtgtttttatcgccggagtcattgcggctggaaataacgccaacgaaatttttatcgagaacggccgttttcacggcggcttgatcgcaaatgaaatatcaaaacggctgggtgcagagagcatatgatcattcatatgctctttttttaaaaaattgaaagatgtaaaaatatgaacaacatggtacgatagatataggaatataaaggaaagaggttgcctgatgtttgcaatcatctctgcaggaattgctcccggcattgcgctgttaagctatttttatttaaaagatcagtatgacaatgaacccgtacatatggtgctgaggtctttttttctcggggttgtccttgtgtttccgaccatgtttatccaatatgttcttgaaaaagagcatgtggggggaggaagctttttcgtttcgtttttgtcttcgggatttctggaagaatcggtgaaatggttcgttctgatgatcagtgtgtatccgcatgctcattttgatgagcattatgacggaatcgtttacggggccagtgtgtctttaggatttgccacgcttgaaaatattctgtatctattcggccacggcgttgagcatgctttcataagggcgcttctgccggtctcctgccacgcgctgatcggagtgattatgggattttatctcggaaaagcccgcttttcgcagaaaaaagcccgtgtcaaatggcttttgatttcgctggccgtgccttcatgtctgcacggttcttacgattttattcttaccgccctcaatcattgggtatattatatgctgccgtttatgctgtttttatggtggttcgggctgcgaaaggcaaaaaaagcacgctccgtcaatatgatccaagtgtgaagaaaccgcgcgtcgcgtgcggtttctttttttatgccttgacgagggataagaaggaaacgtgcataaaaataacctcgtgacagacaatacgggtacactttaaattttgcagtaggaggcttgaagagatgaagtgcaaaggagcctttatggcatgtctcattctattttctttcgccgccgctttcttcgatcatcatgaaacggttcatgcgttttcaaatcaagtgattcaaagaggcgcgacgggtgatgatgttatagaattgcaggcccgtcttcaatataacggattttataacgggaaaatcgatggtgtttacggctggaccacatactgggccgtgaggaattttcaggagaaattcggcatgaagccggttgacggcctcgtcggcgcgaaaaccaaacaggtgctgatctctaaatcaaaatattaccgtgaatatgtaatggagcagatccaaaaagggaatacgttcactcattacggcaacgtcccattggaaaaccaaacaaaaccgagagccggaacgcagaagccggctgcgggaacgaataagcctgctcaaaagccgcaaaacaatacaggcggtcagtcaaatcaaaagcaaaatacgacagcggccaatatgcctggcggtttctcaaacaacgacatcaatcttttggcgcaggctgtgtacggggaagcacgcggtgagccgtttgaaggacaggttgccatcgccgcggtcattttaaaccgtattaaaagcccgttatttccgaatacggtggccggcgtcattttcgaaccgctcgcgtttaccgctgttgccgacggccaaatatacatgcagccgaatgaaagagcaaaagaagcggttcttgatgcgatcaacggctgggatccttctgaaaacgcgatttattatttcaaccctgatacggcgacaagcaaatggatttggggacgtccgcagataaaaagaatcggaaagcacattttctgtgagtaaaagtacgcaaaatgaggtgttaacatgattagaggaatcattatcgctgttctcggtgtcgcgatcgccgcaaccggatactggggatataaagagcatcaggaaaaagatgcggtccttctgcacgcggaaaataattatcaaagggcttttcatgaactgacgtaccatgttgatcagcttcacgacaaaatcgggacgacgcttgcgatgaacagtaaaaaatctctgtctccggcgctcattgatgtatggagaataacatctgaagctcataacaatgtgagccagctgcccctgactctcatgccttttaataagacggaggagtttttatccaacataggagatttcagctataaaacatccgtccgggatttagaccaaaaaccgcttgataagaaagaatatacaacactgaacagcctgtacaaacaggcggagaacattcaaaaccagctccgcagcgttcagcatctcgtcatgagcaaaaatttacggtggatggatgttgagatggcgctagcctctgacaaaaaacaaagcgataatacgatcgtcgacagctttaaaacagttgaaaaaaacgtaggcgctttttctgaagacagcatcagccccacatttacgggagcaaatacagaacgaaaaggttttacgcatctgaaaggaaaacaaattacggaaaaagaagcggtcaaaatcgcgcaacggtttgcgcctgatcataattattcaattaaagtggtcaaaagcggcaggaagacgaatcgggacgtatacagtatccgcatgaaagacgccgacaacaagtcttttatctatatggatattacccaaaaaggcggacatccggtctatttgattcaaaaacgggccgtgaagaaacaaaagatcagcctcaatgaagcatctaaccgggccgtcgcgtttttaaagaaaaatggatatgaaacaaaaggcctcgaaattgatgaaagcgcgcaatataataacatcggcgtcttttcttttatccccgtggagaaaaatgtccgcatttatccggaagccatccgaatgaaagtggcgctggatgatggtgaagtcgtcggtttttccgcgcgtgattacctggcggcgcaccgcacgagaacgattccggctcccgctttgtcagctgatgaagcgaaagcgaagctgaataaaaatgttgaagtgcgggagacgcggcaggcgctgatcacgaatgaactcggtcaggaagtgctttgctacgaaatgctcgggacgatcgggaaagacacgtatcaaatgttcattaatgcggacgacggaaaagaggaaaaaatagaaaagttaaaaagtgcagaacctatatataaagacctataaaaataaaggaggaaaggactaaaagtcttttcctttttttcgttacatgctttaataaaagcataaataatgaaagagtgaaggcccatgatagctgtcggagattatatttggattgaatacatagagaacaatgagcccaaaaaagcgaggagcaaagcagtaagcgttgaaaacggcgaactgcacatctcatatcccgtcgatctggattcgggacggacggtctttttgcataaaggattggtaataacagcggaatttatggggaatggccaagtgccgtatcaatttaaaagcataatcaaaggaaagaaaaaagaccccatcccgatgatcggattggacatcccccctcaggaggaaatgaagcggattcaaagacgccgatacgtccgtgcagacgcagtattggatgtatccgtcaaaatggaagcgaaaaaaaccgctttccaaacggtttcctctaatatcagcgccggcggaatcgctgttgtgatgcctgagcatatttccgcggaaccaggtgaaaagctgtatgtctcattttctcttcccggcaaggaaaatacggcggatataacggctgaggctcttacccagcggattttttatgatgaaaaggcggataaacaaaaaatgacgcttgaatttacagaaatcggccccgcagcgcagcagcttttactccaatattgcatgcgcgcgcagctgcagcagagaagaaacagtctgtcggaataaacagcagcgcacttttccatactaatcctaatggaggtgcgcgtgtatgaaaacgtttgaacgtctgctggtcaaattggtctgcattcagcttatcattttgggcgcggtgcagtttttgcttcattatcagcctattgaaccttatatttcgaaagctgtgaaatatgagggagttgataaaatggagaaaaaagaatggattgaaacggtaaagcggtaaatcagctcaattttttcgccccttttccggcagttcatgatacaatccatagaggagtaaagagcaaggagagagattatggacaagaaattatcaattgcgatcgacgggccggccgctgccggaaaaagcaccgttgctaaaatagtggctgagaaaaaatcatatgtgtacattgatacaggagcgatgtatcgtgccattacatatacggcgctcaagcagaatgtcgatttaactgatgaagccgcgcttacagagcttctgaagcgtacggaaattgagcttgtatccgctccggaaggacaaatcgttctggtaaacggagaagatgtgacagaagaaatccgaaaagacgaagtcagcaaccaagtatcaatcgccgccaagcataaaggcgtcagagaagaaatggtcaaaagacagcagcagctcggacaaaaaggcggtgtcgtcatggacggccgtgatatcggtactcacgtgctgcctgatgccgaagtgaaaatttttctgctcgcgtccgtagaggaaagagcgaagcgccgatatgaagagaataagaaaaaaggctatgacgtgaattacgagacgctcattgaagaaatttccagacgcgacaagctcgattcagagagggaagtttccccgctgcgcaaagcggaagacgcgattgaaatcgatacgacgtcgctcagcattgccgaagtcgcaggaaaaattctggagattgtcgaacagaaatcacgttaacttcgggcggagcgctttataatttttttcgatagacaagatgttattgcttgacaaaccagtccatttattagaagttaatactaataaaactttttattgatcattcaaaatcttttttggatgattctttaatacatattcggctgaaaagcggacattcacatgttcagctttcaaaccgtattaattaagctgtgtaggtttggaccaaggaggttattcaaatgacagaggaaatgaatcaaattgatgttcaagtgccagaggttggagatgtagtaaaagggattgtgacaaaggtagaggacaagcatgtagatgtcgaaattgtcaatgtcaaacagtccggaatcattccaatcagtgaattatcaagtcttcatgtagagaaagcatcggatgtcgtaaaagttgacgacgagcttgacctgaaagtaacaaaagtggaagacgatgctttgattttatctaaacgtgccgttgatgctgaccgcgcttgggaagaccttgaaaaaaaattcgacacaaaagaagtgtttgaagctgaagtgaaagatgtggtgaaaggcggcctcgtcgttgatatcggtgttcgcggcttcattcccgcatcacttgtcgaagctcatttcgtcgaggatttcactgactataaagggaaaaccctctctcttatcgtcgttgaactcgaccgtgataaaaaccgggtgattctgtcacaccgggctgtagtggaaaaagaacagacagccaaaaagcatgattttctccaaacgcttgaggttggaagcgtgcttgaaggaaaagtgcagcgtctgactgatttcggcgcatttgtcgacatcggcggaattgacgggcttgttcatatttcgcagctgtctcattcacacgtcgaaaaaccgtctgacgtggtggaagaaggtcaggacgtaaaagtgaaagtactgtccgtagaccgcgataacgagcgtatttctttatctattaaagaaacgctgccgggaccttggagccaggtcggcgaaaaggtaaaacagggagatgtgcttgaaggaaaagtgcagcgccttgtaagcttcggcgccttcgttgaaattcttccgggcgtggaaggacttgtgcacatttcgcaaatttccaataaacatatcggaacgccgcatgaagtgcttgaagaaggacagactgttaaagtgaaagtgcttgacgtgaacgaaagcgaagagcgcatttccttaagcatgcgtgagcttgaagaagcgccgaaagccgatcaggaggacttccgccaataccaggcgaaagaagagccgagcaccggcttccagcttggcgatttaatcggagacaagcttaataaattaaaataaattggtgataaaacgtgacacgagcagaacgaaaaagagaacatataaatcatgcgctgtctaccggccaaaaccgggaaacggggcttgatgatattacgtttgttcatgtcagcctaccgaacctagcattggaaaaagtggatatatcaacgaaaatcggcggactcacaagcagttcgccgatttttatcaatgcgatgacaggcggcggcggacagcttacatacgaaattaacagatcgctggcaagagccgcgcgcaaagccggcatgccgctggctgtcggttcgcaaatgtcagctttaaaagatccctccgaacggtgttcttacgagatcgtcagaaaagagaatccggacgggctgatatttgccaatttaggcagtgaggcggatgccgagcaggcgaaaagggcagttgatatgattcaagcagatgccctccagattcatttaaatgtgattcaggagatcgtcatgccagagggtgacagaagctttactggcgctctcggccgtattgagcggattgcggcggaagcgggagtgcccgtttttgtcaaagaagtcggcttcggaatgagcagggaatcggcacggcagttatttgatgctggcgcagcagcagttgatgccggcggatacggcggtacaaatttctctaagatcgaaaatatgcgcagagagaaggcgcttcaattttttaatacgtggggaatttccactgccgcaagcttagcggaaatccattcgctctccgctgatcaatcaattatcgcatccggcgggctgcaaagtgccctggatgtcgccaaatcgattgccctcggtgcttccagcgcgggaatggcgggcattttcctgaaagctctcacctctaaaggagaagagggcctgtttgacgagatgatggcgcttttgcaagagctgaaaatgattatgaccgtcctcggatgccaatcggttgcccaattgcaaaaggcgcctttggtcataaaaggtgacacacatcactggctttctgaacgggggattgacacgtcccgtttcagcagacgttaaaaggcatgcggacccgcatgcctttttctgttttttacgattttctttttcggaattccccgttttgctcaaggcttgtcgctcctttatggtgaatcgaatcatcgcgatcagattccacccggcgggaggctttcagttttttctcctgtctgtcttttcccatccttatccgctcctttcaggtataattggtttaaaaaatgcgttcccgctccatactgatcagaggaggagcgattatggaaccgttttattattactggtcaatgtggtttttatggatacttgcgacttttatttttgccaaaacaaaaagccgtttttacgtatcagtctttattttgactaatatgatggcaagcatacatcagattacggcttattttacgctgaacgcggcatatgtcatgttttttgctgcggcatttgtttatgcgggaagcctcggcatgcataaacggctccgtaatattgtgattcatctgacggcggctgcggcgtacggctttatttttctttttgcattatatgatcctgtttggtttatcataaaacctgaatgggcggcggttatactgcttaccgttattacgctttctgttgaggggcggttccctgagaggctttgtctttttgttctcggcatgtgccagggggagctattgtatgctgcagtcatccgcaatattgcgggtgcggcagccgtcggggattataaatggctttcaggctgttcggcgggagtgattcttctcgtcgggctgactacatatgaacagcttgcggcgcgcatcagccaaaaaagcaaaaagcagggcaaaggagcgacaaaaatgtcttgaaaacagacggagactgttacatgaatgcgaaacattttgaagaatacattgtgatctcagtgaaaactgatataataaatgagttaagcccttctgtttgaagggttcttttcatagcgaagatgatttttaataaccggttgaacaattttttgtgaaaatgtaagcggctggattgaaaggaagggtactatgggtaaacctgtcgtagccattgtcggaagaccgaatgtgggaaaatccacaatctttaaccggattgcgggtgaaagaatttcaatagtagaagatacccccggagtgacgcgggaccggatatacagttcggcggaatggctgaattatgattttaacctgattgatacgggcggaattgatatcggagacgaaccgtttctgacacagatccgccagcaggctgaaatcgccatggacgaggctgatgtgatcatctttatggtgaacggccgcgaaggtgtgacgtctgcggatgaagaagtggcaaaaatactgtaccggacgaaaaaaccggtcgtattagccgttaataaattagataataccgaaatgagagcgaacatctatgacttttatgcgctcggctttggagaaccgtatccgatttcgggcacacacggtttaggattgggagatttgctcgatgcttgtgctgagcattttaaaaacattccagagacgaagtacagtgatgatgtcgttcaattctgcctgatcggccgcccgaatgtcggaaaatcatcccttgtcaatgcgatgctcggcgaagagcgggttatcgtgagcaacgtagccggaacgaccagagacgctgtggatacggcgttcacttacaatcagcaggaatttgtaatcgttgacacggcgggaatgagaaaaaagggtaaagtatatgaaacaacagaaaaatacagtgtgcttcgggcgttaaaagccattgaccgctcagacgtcgtcggcgttgtgctgaatgcagaagaaggcatccttgagcaggacaagcggatcgccggatacgcccatgaagccgggaaagccgtcgtcattatcgtaaacaaatgggatgccgttgataaagacgagcgcacgatgaaagaatttgaacagaatattcgggagcatttccaatttctcgattatgcgccggtgctgtttatgtcggcactgacgacaaagcggattcatacactcatgcctgcgattattaaagcgagtgaaaaccactctctccgcgtgcagacaaatgtcttaaatgatgtcatcatggatgcggtcgccatgaatccgactccgacgcacaacggctcccgtctgaaaatttactatgcgactcaagtcgctgttaagccgccgagcttcgttgtttttgtcaacgatccggagctgatgcatttttcttatgaacgctttttagaaaaccgaatccgggacgctttcggatttgaaggtacgccaattaaaatatttgcaagagcaagaaaataaaaaggtgtgatacagagatgaaaaaagtggcaatgcttggagcgggaagctggggcactgcactttctttagtgctggctgataacggacatcaagtcatgatgtggggacatcgtgccgaattgatcgatcaaatcaacgaactgcatgaaaacaaagattatctgccgggggtggagctatcaagttctatcattggtacagctgatttaagcgaggctttaaaaggagctgacttcatcattgtggcagttccgacaaaagccattcgggaagtgctgaaaaaggctctgccgtacatcccgaaacaatcgatttttgttcatgtcagcaagggaattgagccggattcgcttctccgcatttcagaattaatggaagaggagctgcctgaggagtacagaaaagacatcgtcgtgctttcagggccgagccacgctgaggaagtcggattaagacacccgacgactgttacatcatcttcaaaaaatatcaaggctgcagaagcggttcaggatctattcatgaaccagcattttcgcgtctataccaatccggatatgatcggtgttgaaatagggggagcgttaaagaatatcatcgctcttgcagcggggattacagacggattgggatatggagataatgcaaaagcggccttaatcacccgaggtcttgctgaaattgccagactcggcacaaagatgggcgggaatccgctcaccttttccggcctgaccggcgtaggcgatttaatcgtgacgtgtacaagcgttcattcccgaaactggcgcgccggcaacctgctcggcaaaggatataagctggaagctgtcctggataagatggggatggttgttgaaggcgtgcggacgacgaaagctgcgtatcagctgtctcaaaaataccaagtgaaaatgccgatcacagaggcgcttcaccaagtattatttaacgggcagaaggtagaaacagccgtagaatccttaatggccagagtgaaaacccatgagatggaagacttggtcaacacattcgaaaaccgggtgaagtgacaataccatgccgtcagcatattctgaagtgacgaaagtccaaaacgcagaactctccggctgaaatcgcttaaaacatttgctgatttaggcagaagaggatgcagacgtacgcatctacgcatactatagcatcgaagtccaagagagtgtatctcagacgtacaggtgaatatagtcaacttgactgaagcaaagtccccctctttgcttcagtttttttgttttttcaatagatggaaaacctgttgatcttttcaacatttgtatattaaaatgaaatataacgcttacaatgatgggacggggggcacgaacgtgagtgtggcattgatgaaaatgtggtttgcgcttggtgctatgggattaatgtttgttgcggtggcctctatttatgtcagcaggtacaaagtgaaaaacaaactgataaaagcagcggtttcttcactcgcttatgcctgcatggtcatctcgggattgatcgtgttaatggtcgttttcagcgggcctgtcaatgaataaagccgaaagggggcgcggaatgcataagttaaaaatggccgtcataacggcaatggcggtgcttctgctgtccggctgtctgtaccctgaagcgaaaaaaactgaaaataaagtatcttacaaacatcagcttcagcaggtgcaagcggcagtggatgaatttaaaaaggcgaacggcggacttctgccgattcagacaaaagatatgaaaacaccgctctatcaaaaatatccgatagattttaagcggctcgcgcccagatacatagaggagccgccggcctcagcttatgaaagcggaggaatgtaccaatacgtgcttgtcgatgtggaacataagccgaccgtcaagctggtcgatctccaaatggcggaagcaatccgcgacatgaagctgcgtgtcaaaatgtatcaggaaaagcatacatatcctccctatgaggacgccgtttcaaaagggctgttcactttaaataaaaaaaagctcggcatgaaagactctccttcagtcaaaagtccggtttcaggcacgtctctgccgcttttaatgggcgctgacggagaaatctatgccgactatcgcgtcgatcttgcccgctgcctgaaggaaaacaaaaagaaaatcaaaccgggcgcggaaattcaggatattttatggaaagagactcctttcgtcccggccttttcagtcacatacaccgtaaatgaaaaacaggaacccgtttttttagaaagtcaaacgaaacaggaatgaacctttttcccgcgcatacaaatagggagaaaggtttttttgattttgatagaaaagactgcctgaaaattttctaaagatgtcatattgaaataggacaacgtcatacacatatagtgtcctgtatttgattggagaatggtgaatgaaaaatgataaggataggaagtccgggaggggatcacttggaaaaggtcgatattttcaaggatatcgctgaacgaacagggggcgatatatacttaggagtcgttggcgctgtccgtacagggaaatctacattcattaaaaaatttatggagctcgtggtgctcccgaatatcagcaatgaggccgatcgagcgcgggcgcaggatgagcttccgcaaagcgcagcaggaaaaacgataatgaccacagaaccaaaatttgtcccgaatcaagccatgtccgttcatgtcgcagaaggacttgatgtcaacatccgtcttgtggattgtgtgggatatacggttcccggggcgaagggatatgaggatgaaaacggaccgagaatgatcaatacaccttggtacgaagaaccgattccctttcatgaggcagcggaaatcggtacgagaaaagtcatccaggaacactccacaatcggggtcgtcattacgacagacggctcaatcggcgatattgcgcggggcgattacgtggaagcggaagaaagagtcatcgacgagctgaaggaagtcggtaaaccgtttattatggtcatcaactcggtaaaaccgtaccacccggaaacagaagcgctcagagctgaattaagcgcgaaatatgatattcccgtcctcgccatgagtgttgaaagcatgcgggaaacagatgtgttaagcgtcctcagagaagcgctttacgagttccctgtgctggaagtcaatgtcaaccttccgagctgggtcatggtgctgaaagaaaatcactggctcagagagagctaccaggaatcagtgaaagaaaccgtaaaagatattaaacgcctgcgcgatgtcgaccgggttgtcggccacttcagtgaatttgagtttattgaaagcgccggtctggccggaatcgaacttggccagggtgtcgcagaaattgatttgtatgcgccggatcatttatatgaccagattttaaaagaagttgtcggtgttgaaatccgcgggaaagaccacctgcttgaattaatgcaggacttcgcccacgcgaaaaaagaatatgatcaggtatcagatgcgctgaaaatggtgaaacagaccggctacggcattgccgccccggccttagccgatatgagccttgatgaaccggaaatcatcagacagggatcaaggttcggagtaaggctcaaagcggtcgctccgtccattcatatgatcaaagtggatgtggaaagtgaattcgcgccgatcatcgggacggaaaaacaaagtgaagaacttgtccgctacttaatgcaggactttgaagatgatccgctttctatctggaactccgatattttcggcagatcattgagctctatcgtaagagaaggaatctccgcaaaactgtcactcatgccggaaaatgcgagatataaactgaaagaaacgctggagagaattattaacgaaggctcaggcggcctgatcgccattattttgtaagctgaaggacctcttcctgaaacggggggtctttttttattctttttagatactggaaatcaatcaaggattaggaggaaaaaagcaaaaaaaggaatatttgttcggtaaaacacgtgaaaaccttgacgagcaagggattgaggctttaaaatgcttgatatggctttttatatgtgttactctacatacagaaaatcttcactttgttggacaaacattcctcaaagtgtctgttttcttttgaaaagccgtttacttgtctgttcttccctgctttgattttttatcagacaggtttagaatcaggctgaactgtgaagaaatgataataaactgctgatttgatacccttttgggaggaggtgaaaggcatgaacaagacagaactaatcaatgcggttgctgaagcaagcgaattgtctaaaaaagacgctacaaaagcagttgattctgtttttgatacgattttagatgcacttaaaaacggtgataaaatccaactgatcggtttcggtaactttgaggtgcgcgagcgctctgcacgtaaaggacgtaacccgcaaacaggtgaagaaatcgaaatccctgcaagcaaggtacctgctttcaaaccaggtaaagctcttaaagacgctgttgcaggaaaataattgtgaatatagatcgtgtatgcatctgatacatacactttgtttcttcacagaaaagccccttgataaaggggcttttcatatttaagcagcctcggtcaccgggcaggactttcgttttgcttttggcgcggcaaatgtgctagaatcgaaattaaatgtattcaatggtggaggacacagacaatgaaagaagttaataaagaacagattgaacaggcggttcgccagattttagaggcgattggagaagacccggaccgggaagggcttttagatacgccgaaacgcgtggcaaaaatgtacgcggaagtattctcgggattaaatgaagacccgaaagaacactttaaaaccgttttcggagaagaccatgaggagcttgttcttgtaaaagatatcgcgtttcattccatgtgtgaacatcaccttgttcctttttacggaaaagcgcatattgcctacattccgcgcggcggcaaagtgacgggcctgagtaaattggcgcgggcggtggaagccgtctcaaaacgcccgcagctgcaggagcgcatcacttcaacgattgcagaaagcatcgtagagaccttagatccccacggcgtcatggttgtcgtcgaagctgagcatatgtgcatgacgatgaggggcgtaagaaaaccgggcgcaaaaacagtgacttccgctgtaagaggtatttttaaagatgacgcagcggcgcgttccgaagtgttagaacatattaaacgtgcggattaataatgatagagggtgcagatatgaattcaaagcattcaagtgattttgtcgtcattaaagcggtcgaggacggcgtgaacgtcatcggtttaacgagaggaacggatacgaaatttcaccattccgaaaaactggacaaaggcgaagtgattatcgctcagtttactgagcatacctctgccatcaaagtgagaggcaacgccctcatccagaccgcttacggagaaatgaacagcgaaaaaaaataagccggctgtttcccgcttttgccaaatgcccgcaaacggcgggagaatacagccaatttcttttttttatgctataatgatacctgcgtataataatgacgagtaaatctcatacatattagaataaatgtgaatttggggacaagggtgatatttttgcaagacatctacggaactttagcgaatctaaatacgaaattaaaacaaaagctgtctcatccttatttagcgaaacatatttctgcgcctaaaatcgatgaggataagcttcttctttttcacgctttgtttgaagaggcggacattaagaacaacgacagagaaaattacatagtaactgcgatgcttgtccaaagcgcccttgatacccacgatgaagtgacaacagccagagcgttaaagcgagacgaaaataaaaaccggcagctcaccgtgcttgccggcgactatttcagcggactgtattattcgcttttatctgaaatgaaggatatctatatgattcggacgctcgctacggcaattaaagaaatcaatgagcataaaatccgtctgtacgatcggtctgtcaatgacttgaatcaattgatcgaaagcatggcgattgtggaagcggccctgtttcacagagtgtcagaccactttaatcttccgcgctggaaagagctggcgagtgatttttttgtatataagcggctgatgaacggcaatgctatatttctcgatgtcatcggcaatattgtaaagtcagggaaatcaaaggctgacataatggaagatagcttccgaaaggcaaagcaaagcattgaaacgctgctgccgctcaattcaccaatccaaaacctcatgctgaaccggcttaaagcgatcagccaggacaaaacatatcatcagaaagtggaagaagggtaatcaacatgcaggagtcaaaagaacagcgcgtacacggcgtgtttgaaaaaatctataaaaattatgaccaaatgaactctgttatcagttttcagcagcataaaaagtggcgcgataaaacgatgcagatcatgaatgtaaaagaaggcgcaaaagcgcttgatgtctgctgcggaacggctgactggacgattgccctcgcagaagcggccggaaaaagcggcgaaatcaaaggactggatttcagcaaaaatatgctgagcatcggtgagaaaaaagtgaaagagggcggttacagccaaattgagcttttgcacggaaatgcgatggagcttcctttcgctgatgattcttttgattttgtcaccatcggcttcgggctgcgaaacgttcccgattatctgaccgtgctgaaagaaatgcggcgggtcgtcaaaccgggcgggcaggtcgtatgtctggaaacatcccagccggaaatgttcggattcagacaggcatattttctttattttaaatacatcatgcctttcttcggaaaaatgtttgcgaagagctataaagaatattcttggcttcaagaatcggcaagagaatttcccggtatgaaagaacttgcgcgtctgtttgaagaagcgggcctgacgaatgtcaaataccattcgtttaccggcggagtggccgctacgcatatcggttggaaatgatgaatatacagatgtttgggtgaatgatatgaaatttaaaatggcctattcttttttaaatgacgatattgatgtgatcgaaagggagcttgagcaaacggtgcggtcagactatcccttgctgagtgaagccgggctccacctgctccaggcgggcggcaagcggatccgccctgttttcgtattgctttccggcatgttcggcgactatgacattaataaaataaaatatgttgcggtgacgctggaaatgattcatatggcgtccctcgtgcatgacgacgtcattgatgacgccgagctgcggaggggaaaaccgaccatcaaagccaagtgggacaaccgcatcgccatgtataccggtgattatatgcttgcgggctcacttgagatgatgacgagattggatgagccgaaagcccaccggatcctgtccaaaaccatcgtagaagtatgcctcggagaaattgaacagatcagagataaatacaatatggagcaaaacctcagaacctatttgcgccgcatcaaacggaaaacggctcttctcattgccgtcagctgtcagctcggcgccatcgcttcgggagctgatgagaagattcacaaagcattatattggttcggttattacgtgggcatgtcctatcagattattgacgacattcttgatttcacttcaacggaagaggaactgggaaaaccggtcggaggggatctgctgcaaggaaatgtcactctgcccgttttgtacgcgctacgtcagcctgaattgaaaaatcagctgaaattaattaacagtgaaacaacacaggagcagctcgcccccattattgaaaatattaaacgcacagacgcgattgaaaaatcaatggccgtcagtgacaggtacttaaaaaaagcgtttgaaaaactgaatacactgccgagaggacgtgcgcgctcatcattggccgccatcgccaaatatatcggcaaacggaaattttaaattccttttacgaacaagatgtgaacattctccgccctggattgattaattgtcagaaagatgttacgatttcggtgtgcaacttgaaagcctatacataatgatggggtggagaatcttatggaaaaaacttttatcatggtaaaaccggacggcgtacagcgccagctgatcggagagattttatccagatttgagcgtaagggcttacaattggcaggagccaagctaatgcaagtttcagaacagatggctgaaaaccattatgctgaacataaagggaagccgtttttcggcgagcttgtggaattcattacatcaggacccgtatttgcaatggtatgggaaggggaaaatgtagtagagatcacaagacagctgatcggaaaaacgaacccgaaagatgcactgccgggcacaatccgcggtgattacggcatgtttgtcggaaaaaatatcattcacggttcagactccttagaaagcgctgagagggaaattcacattttctttaaacaggaagagcttgtaccgtatcaaaaattaatggccgactgggtgtactaaaccgtcagcctttctttttctcgtattatgaaaaggtttacatcatttaaaaaagacagaggctgcgttgccctgtcttttcgtttctcacaaatcagcccgcgggctgatttttttattgaaatcgtacaatttcgacagaaaacaggctatactaggacaaaagacagcgagattgggagagaagcaatggagccttacgaaatttttatcaccaagtggaaacaaataaccggcgttgatttatctttatacaaagaagcacagatgaaaaggcggctgacgtccctttatgaaaagaaggggttcagagattttcaggaatttgccgccgctttggaaaaggacaagcttttattaaacgaaacattggacagaatgacgatcaatgtttctgaattttaccgaaattataaacggtgggaagttcttgagacctcaattcttccgttaataaagcataacaaaccgttaaaaatatggagtgcggcctgttcaacgggagaggagccctatactttggctatgattctcaatcagcagacgggactggccggatttgatatattggcgacagatattgatgaaaaggcgctaagcaaagccaagcggggcatctatcaggaacgctcgctgcaagaggtgccggcttccgtgaaaagccgttatttcaccaagcaggctgacagcagttatcaagtaaaacaagagattcagaacaacatccggtttaagcggcacaacctgcttgccgacagctatgaacaggattttgatctgatcgtctgccgcaacgtctttatttattttactgaaaaagcaaaagaagagctgtatgtgaaaatggcgggcagtctgaaaaagaacggaattctgtttgtcggcagtacagaacaaattttcagcccggaaaaattcggccttgagagcactgatacatttttttatcaaaaaagatagaagacatttaatgaaaacttgtggtatagttttacttaaaagcgttaatgcgatgaagggagaagaaagaaatgagatacttaacagccggagaatcacacggtccgcagctgacgacaattatagaaggtgtgcctgcggggctttatataactgaagaagacattaattttgagcttgccagacgtcaaaaagggcacggccgcggacgccgcatgcagattgaaacggacagagcgaagatcacaagcggagtgcggcatgcccggacactcggttcacccatcgcgctcgttgtagaaaataaagattggactcactggacaaaaatcatgggcgccgcaccgattacagaagaagaagaaagtgaaataaaacgccagatttcaagaccgagaccgggacacgcagatttgaacggtgctattaagtataatcaccgtgatatgagaaatgtgttagaacgatcttccgcgcgtgagacaacggttcgcgtggctgccggagccgtcgctaaaaagattttagcggagcttggcattaaagtcgccgggcatgtcctgcaaatcggcagcgtaaaagcagagaaaaccgattacacatccattgaggatctcaaacgggtaacggaagaatcaccggtcagatgctatgatgaagaagcaggccgtcaaatgatggcagccattgatgaagcgaaggcaaacggcgactcgatcggcggaatcgttgaagtgatcgtcgaaggcatgccggtcggtgtcggaagctatgtccactatgaccgtaagctggacagcaagctcgctgctgccgttctgtcgattaacgcgtttaaaggcgtagagttcggcatcggttttgaagcggccggcaaaaccggcagtgaagttcatgatgaaatcgtatgggatgaagagaaaggctatacacgagccacaaacaggctcggaggattagaaggcggtatgacgacgggaatgccgattgtcgtccgcggcgttatgaaaccgatccctactttgtacaagccgctgaaaagcgtcgacattgaaacgaaagaaccgtttacagcgagcattgaacgttcagacagctgcgcggttccggcagcaagtgtagtggctgaagcagcagtggcctgggaaatcgcaaatgccgtcgtcgaacaattcgggcttgaccagatcgaccgcattaaagaaaatgttgaaaacatgaaaaaattatcgagggaattctgatgaaagagcttgaggttcggacagcttcctccgcatatcccgtgtatatcggtgaaggcataaggaaacaggccgctgcccttttgtcttcactgaacaggccgctgacaaagatccttctcatcatcgatgctgaagtcgaccggctttacggtgatgagatgttccggcttttaaacgaaacatggcccgtgaaaaaagtgatcgttccaagcggagaagaagcgaagtctctaaaagagtatgaacggattcaaacggaagcgatcgctttccatatggaccgctcctcatgtatgatcgccttcggaggcggcgtgacgggtgatttggccggcttttgcgcagcaacttttatgcgcggaattgatttcattcaaatgccgacgacactgcttgcccatgacagcgcggtcggcggcaaggtggccgtcaaccataaactcggaaagaacttaatcggcgcgttttatcagccgaaagcggtgatttacgatacggagctattgaaaaccctgccggaacaagagctgagatcgggtatggctgaagtgatcaaacacgcgtttatcgccgatcatgcttttttagaaaaacttctcacgtttgacacgttgcaaggactgacaagcgctgagctgaatgaaatgatttataaaggaatttcaatcaaatcggccgtcgtgcgtgaggacgaaaaggaagaggggataagagcttttctgaatttcggccatacgctcggccatgccgttgaggcggaatacggctacggccggattacacatggagatgcggtcgccctcggcatgcagtttgccctttacgtgagtgaacaggttgcgggttgcaagatgaacaggaaagaactcacacaatggctgattgggctcggctacccgggaagcatcagacaagatattgaaacgccggttctctccgcccggatgatgaatgataaaaaaacgcgcggaggcatgacacagttcatcgtgttaaaagaattaggcgaagcgcgggactgcatgctttcaaaagatgagctcgaaaatttgctgaacaaatggcgaatggaggaaacagcatgatgatacgcggcattcgcggagcaacaacggtggaacaagacaccgaacaagaaattttagaaaaaacacagcagctgcttgaaaaaatcattgaacaaaatggatgcaagccggaagacgttgtacagatcctgttatccgccacgcctgatatccattccgtatttccggcaaaagcggtccgccgcctttccgggtggcagtacgtcccggtgacgtgcatgcaggaaatggatgtcaccggcgctctgcaaaagtgtatccgtgtcctgatgacggttcagacggatacgcctcaggatgaaatcaagcatgtctatttagaaaaagccgttgtgttaaggccggatttatcattgacaaaaaatactgacatgtaatacgataaacaaagcttagaaatacacaagagtgtgtatagagctggtaagtaagatattgaacagttgagtttagaatagggtagcagagaatgagtttagctgagctgagataaacacgtttttattctgcccaaaagaagcctttcttttgggtttatttcttatacgcaagactcctctcactcttcatctcattctccttaccgtaaggaggagaatcatgaatttacaatcggatgtttctttatttttaaaggacagtctgacacaccgcaccattccaatcgcagagacttttacggtcgacacgatcacacccattcagatggttgaaaaactggacagaaacattacgtatcttttagaaagcaaggatgagtcgtcaagctggtcgagatactcttttatcggcctcgatccttttatcacgattaaagagagtcataacacattcactgccgctgatccaaatgggcatacgctgtttgaaggcggagaattaaaagccgtgcttgactggatgaatgaaagcttccgcattaaaacacccgagcttgatatcccatttgcgggaggggcggtcggttatctgagctatgacatgattcctttgattgagccttccgtgccaagccacgcgaaagtaacagatttcgaaaaatgcatgctgtttgtctgccggaaaatcatcgcgtacgaccacgaaacgaaacaagtgcatttcattcagtatgcggagcttaacggccgggagacggaggaagaaaagcgggccgtttttaaagaaaattgcgcggagcttcgtaagcttatcggtattttgacagaatcgaaagatatgaaagagccgtttttttctaaagaaacgtttgacacgccaagttttgccgatgtgacatccaattatacgaaagaagagtttatggccggcgtcaataaactgaaagaatatataaaagcgggagacatttttcaaggggtgctttcgcaaaagtttgacattccggtatccaggcattcatttgagctgtacagggtgctccgcatcatcaatccttcaccctatatgtactatatcaaactgcctgacagagacattgtcgggagttcgcctgaacgtctgatccgcgtgcatgacaggcacctggaaattcatccgattgccggaacgagaagaaggggcgccggaaacgaagaggacgaacgcctgaaaaaagagctgatgaatgacgaaaaagaaaaagctgaacattacatgctcgtcgatcttgcgcgcaatgacatcggcagagttgcggagtacggttccgtagccgttccggaattcacaaaggtcgtttctttttcacatgtgatgcacatcatctctgttgtaaccggccgtttaaagcagggcatccatcccgttgacgcgctgatgtcggcattcccggcaggaacactcacgggcgctccgaaaatccgcgcgatgcagcttttaaatgaattagaaccgacttccagagaaacctacggcggatgtatcgcttatatcggatttgacgggtcaattgattcgtgtattaccatccgcactatgagtgtcaaaaacggtacggcgtcggtgcaggcgggcgcgggaatagtcgccgattccgtcccggaagccgaatatgaagagagctgtaataaagcgggggcgcttttaaaaacgattcaaattgcagaagacatcttttctggcggggaggagaagacggatgaacaaatttctgcaatcgtgcgttaatggccatacgctgaaaaccggagaagccgaaaagctgatggaaatgatgatgaacggggacatgtcgcagtctgagatcggcgggattttatcggtattagcccaccgaggtgaaacggcggaggagcttgccggatttgtaaaagtgatgcgggcgcgggcacagacatcaggtggcttgacggatgtcgttgatacgtgcggaacaggcggagacgggatttctacgtttaacatatccacggcagcggcaattacagcttctgccgccggagctaaagttgccaagcacggaaatcgctccgtttcgtctaaaagcggcagcgcggatgtgctggaaaagctgggggtttccattcaagccactccagacagcgttaaacgcagcattgaaatgaaacaaatggggtttttgtttgcgccgctgtttcattcgtcaatgaagcacgtcgccgccgcaagaaaagagcttggcttccgaaccgtatttaatctgctgggcccgctcagcaacccgctgcaggtgaagcggcaggtgatcggcgtctattcatttgataaagcgcgcctgatggcaagcgctctggaacaatttgatgtcagacacgtcatgcttgtgtcggcccgtgacggattagatgaattgtccatctcagcaccgaccgatatcattgaactgaaaaacggtgaacgtctggaatattccgtttcacctgaacaattcggctttacagaaggttcactaaaggatattcaagtgagttcatcggaagaaagcgcgctcctcattcagaatatttttgcaaataaagctccgtcatccgctctgcatattaccgccttaaatgcgggcgcggccatttatacggcaggtcttgcaaacgatctgaaagaaggaacgaaaaccgccttagaagcgattcaaaacggagatgccaaaaggcagctcgaacgtctgaaacagaaagaggaagaaatgtatgcttgatcaaatcattcagcagaaaaaagaagaaatcaaatccatcgtgctgccggaaacctgtcaaattgaacggagatcctttaaaaaagcgctcctgaacccgaaccgttttatcgggctgattgccgaagtgaaaaaagcttcgccgtctaaaggattgattaaagagcattttgttccggaaacgattgcggcggattatgaagcggctaaagccgacgccctttcggttctcacggatacccgtttttttcaggggagaaatcaatttctgacagatgttaaacaaaccgtgtctcttcccgtgctgagaaaagattttattattgattcccttcaggtggaggaatcgttcaggatcggcgccgatgccattttgctgatcggggaagcgctggaaccttcagagcttcatgagctttatctagaggcccgcgagaagggcatggacgttctcgttgaaatccatgatgaaactgtgcttgaacggattttacaagtgtttcagccggacattctcggcataaacaaccgggacttaaaaacgttccgtacttctgtttcgcaaacggaaaaaatagcgcagcttgtaccggacggctgcctgctggtcagtgaaagcggcatcggttctttggctgacctgcaattcgtcaacaagcacggggcgcaggctgtattggtcggagaatccttaatgagagaggattcgcagcaaaaggcgatccgcggactgttcggggagtgacgatatgaaaaagcctgagttaaagtactgtggaatacgatcgaagcgtgattatgaacttgcggcagcttcagaagcggattatctgggatttatttttgccgcaagcaaacggagagtaacgccggatgaggtccggaaatggaaagagcaggttcggacagacaagaaacatgtcggagtatttgtaaatgaaacgatagaaaacattgcgcaaatcgcctctgatctggcacttgacgtcatccagcttcacggtgatgaatcgcctgaggatgcccgccgcctccgcccgcttgtgcgctcggaaatatggaaagcgctccatcacggggaaggaacgctccgtcagatgactcaatttgcacctgctgtcgacggctatgtcattgattcttcagtaaaaggaatgagaggcgggacgggaatcgcgttttcatgggcccgtgtccccttgtaccgaaagcaggctcaaaatgcaaacaagcgctgttttatcgcgggcggcgttaatcctggaacgattaccggcttactgagatcgcgtccgtgcggtatagatcttgccagcggaattgaaaaaaacggacaaaaggatcaaacactgatccggcttttagaagaaaggatgaaccactatgtatccatatccaaatgaaatcggaagatacggcgaattcggcggcaaatttgtccctgaaacattgatgcggccccttgaggaaatcgaaacggctttcacagaattaaagaatgatcccgtttttcatgccgaatataaaaaactattgtttgattactccggaagaccgaccgcattaacgttcgcagacagggtgtcagagtatttgggaggggcgaaaatctatctgaaaagagaagatttaaaccataccggctcccataaaattaacaacgcgttaggccagattctacttgccaaaaagatgggcaaaacgaaaatcatcgccgaaaccggtgcgggacagcacggtgtggctgccgcgacagccgccgcaaaattcggttttaagtgtacggtttttatgggtgaagaagacgttgcgcgccagtcgctgaatgtattccggatgaaactgctcggcgcggaagttgtgccggtcacaagcggaaacggcacgctgaaagatgcgacgaatgaggcgatcaggtattgggtccagcattgtgaagatcatttctatcttatcggttctgtagtggggccgcacccatatccgtatatcgttcgcgaatttcagaaaatcatcggcgaggaagcgaaagaacagctccgccgggttgaaggaacgctcccggataaggttgttgcatgtgtcggcggcggaagcaatgcgataggcatttttcaggcctttttagacgaagatactgagctgatcggcgccgaggctgccgggaaaggaattgatacaccgctgcatgcggcaacgatcgcaaaagggacgctcggggtgattcacggttcaatgacctatttaatacaagatgaatacgggcagattatcgaaccgtattccatttcagcaggccttgattacccggggatcggccctgagcacgcctatctgcataaaagcggccgtgtaacgtacgaaagcgtgacagacgatgaagcgattgccgcgttacgtctgctttctgaaacagaaggtattcttccggctattgaatctgcccacgctctggcaaaagcgtttgaaatggcaaaagacatggataaagacaaaatcattctcgtcagtttgtcgggaagaggagataaagatgttcatacgctgatgaatgttttggaaaacggggtggagacacatgtttaatctgcgagattctgaaaaattatttatcccttttattacagctggcgatccgcttcctgacatttctgttgagctggcaatatcattgcagaatgcaggcgcgtctgcccttgaaatcggcgttccttacacagatccgcttgcggacggacccgtcatacaacgggcttcaaaacgggctctggaaaacggaatgaatatcgtaaaagcaattgaacttggcggcaaaatgaaaaaaaacggcgttcatattccaattatcctctttacgtattataatcctgtgttacaattagaaaaagaacactttttcgctttactgcgggaaaacgacatagacggtctgcttgtacccgaccttccattagaggaaagcgcccttttgcaaatgacatgcaaaaaggagaacatcgcttatatctcactggttgcgccgacaagtgaagaccgtttgaaaataattactgaacaggcctgcggctttgtgtattgtgtatcctctttaggagtgacgggcgtacgcagcgaattcgatccgtctgtatactctttcattcgtaaggtgaaagaattcagctctgttccggtggcggtcggttttggcatttcaaaccgcaaacaggttgacgggatgaatgaaatatctgacggtgtcgttgtcggcagcgcgcttgtcaaaaaagtcgaagagcttaaaacaaagcttgtgaatcccggaacaagagctgatgcgcttcttgaatttgaagaatacgcaaagacgttcggacgactgtacagtgtaaaatgaggtgactggatttgcagattaaagaacagctgcggcagctgaaaccgtatcagccgggcaaaccaatagaagaagtgaaaatggaatacgggcttgagaaagtagtaaaactcgcttctaacgaaaatccgtttggctgttcacaggccgctaaagatgcgctgcatcaggagattgagcagcttgcgctgtatcccgacggttacagtgccgctttgagaacgcggctcagcgagcatctgcaggtcagtgaatcttctatcattttcggcaacggctctgatgagcttgtgcagattatctgccgttctttattaaatgatcaggcaaacacgattaccgccgccccgactttcccgcaatacagacacaatgcggtgattgaaggcgctgaggtgcgcgaggtgccgctccgcagtgacggcgctcatgatttggaccggatgctggaagcaattgacggcaagacgaaagtcatatgggtatgcaaccccaataatccgacggggacatatacttctgagcaagagctaatcgcctttttaaacagagttcccgagcatatactcgttgtacttgatgaagcgtactacgagtatgtcacggcggaagattacccagaaagcattccgcttttaaagcaatatccgaatgtcatgatcctccgcaccttctctaaagcgtacggacttgccgcgctgcgcgtcggatacggcattgcggacgaagcgctgatccgccagattgaaccggcgagagagccgttcaatacgagcagaatcggtcaggcttcggcactggcagcgcttgatgaccagacatttattcaggaatgcgtcgagaaaaataaagcaggccttaagcagtattatgattttgcggaaactcacggattaacttgttatccttcacaaaccaactttgtgctcattgattttaaccgcccggcggatgaactgttccaagccctgttggaaaaaggatatatcgtccgctcaggacaggcgctcggatttccgacagcgttaaggattacggtcggtacgaaagagcagaatgaggaaattctcacaattttagctgaaatattataagaggtgatcaagcatcacctctttgctctattaaaatagttgaaaaaggaaatgagtgaaatgaaggatactatattgcttgcggggatcgggctgatcggcggatcgatcgcattggccatcaaaaaggagcatccgcataaacggattatcggtgtggatatttcggaagaacagctcactgccgcgctgaagctcggaattattgacgaacgggccggttcatttacggaaggtgtgcagcaagcgtctgttgtcattatcgccacgcctgtcgcccaaacgctgaaaatgctcgatgtgctggccgcatcagacatcacccatgaactcctgattacggatgtgggcagcacgaaacagaaagtcgtcagctacgccgacaaagtgctcccggctcactatcaatttgtcggcggccatccgatggcgggatctcataaatccggggccgctgccgcgaaagaatttttattcgaaaatgcgttttacattctaacacccggaaaatcaacttctaaagagtcagtaatgcatctgaaggaactcttgaaagcggcaaacgcccactttgtggagatgaccccagaggagcatgacggcgtaacgagcgtcatcagccatttccctcatatcgttgctgcaagcctcgtacatcaggctcatcatgctgaagaagattatccgtatttgaaacgtttcgcagccggcggttttcgggacatcaccaggatcgcctcaagcagtccggcgatgtggagggacatacttcttcataacaaagataaactgcttgaccgcttcaaagaatggaaacgggagattgacacgatcgaatcttatgtagaaaatgaagatgcggacagcctgttcggatattttaaaaaagcgaaagattatcgcgacggtctgccgctccgtcaaaaaggagcgatcccgtccttttatgacctttatgtcgatgttcccgatcatccgggggtcatttcggaaattacggcgatattggcagaagaaaaaatcagtatcaccaacatccgcattatcgaaacaagagaagatattaacggaattctcagaatcagtttccagactgatgatgaccggaagcgcgcggaaacctgcattcaatcccgcgccaaatatgacacattttacgctgactgaggtggaaaacattgaaaagagaaaaagtgacgtctttaaacggtgaaattcatattccgggggataaatccatctcccaccgttctgttatgttcggagcgctcgcggaaggaacgacaacggtaaaaaactttttgcccggagccgattgtctgagcaccattgcctgcttcagaaaaatgggtgtctccattgaacaaaacggaagtgatgtaacgatatacgggaagggcattgacgcactttgtgagcctgacagccttcttgatgtcggaaattccggcacgaccatccgcctgatgctcggcattttagccggacgcccatttcacagtacggtagcgggcgacgaaagtattgcaaagcgcccgatgaagagggtgacggagcctttaaaacagatgggagccgcgattgacggaagagcggacggaggatttacgcctttatccgtaagaggcggacaattgaaaggcattgattacgtctcccctgttgcaagcgcgcagatcaaatccgccgtgctgcttgccggattgcaggctgaagggacgacgaccgtcactgagcctcataaatcaagagaccatacggaacggatgctgaacgcttttggcgccgagcttgcggaaacggagacgagcgcttccataacgggcggtcagaagctccggggagctgatattttcgtgcccggcgatatttcttcagcggcctttttcctcgcggcaggcgctgtcgttcccggaagccggattgtgctgaaaaacgtcggcctgaacccgacacgcacgggaatgattgatgtcttaaagcaaatgggagcttcacttgaagtgattccttcagaagcggacagcgcggagccttacggagacctggttattgaaacttcagatctgaaagcggcagaaatcggcggagaaatcattccccgtttaattgacgagatcccgattatcgcccttttggcaacgcaggctgaaggcacaactgtcattaaagacgctgcggagctgaaggtgaaggaaacgaaccggatcgacaccgtcgtatcagagctccggaaaatcggcgcagacattgaaccgactgaagacggcatgaaaatacacggcaaaaaaacgcttgcgggcggagccgatgtgtcaagccacggcgaccaccgcatcggcatgatgctcggtatcgcttcatgcctgacagaagagccgattgagatccgtgatactgaggcgatccatgtctcatatccgacattttttgagcatttagatcaattagccaaaaaagcctgaagacgattcttcgggcttttttcttcatgtgtcataaagtcttgggcattgacatagcttgtcttaaacagaaaataacagaaagggggaatgcgttttcgttacagaaacagccggaacaaattgtgctgtctgcgtataaagatgccgtccccttttttgccgttttcctcttaactattttctgataaactataatgccgggtgaagcatcttatttgcgggcaggccctgtctgaattatgataagaataacccgaataaaaacccttttcattggttgatgaggtataggaaaagaaaggaccggtctgatttgaatacattgattcaagaagccataaaattagttgaagcaggtgaaaccgaaaagggactcaaagcgctttcaaaagctgaaacgcagcttcatgacgaagacaaagccattgcagcccagctctactatgaatggggaaacgccgaaaaagcgttagcgctgatcagtgatctgcatgacctttatccggatgagtctgagctgacgaatttttacgccgaattgttaatagatattgatgaagaagaaaaagctcttgaggtgctggagacaatttctccggaagacccgtcttacgcggaaagccttcttttaatggctgatctgtatcagatgcagggcttatttgaagtaagtgagcaaaagctgttacaggcgaaagcgatgttacaagatgaacctgttattgatttcgctctgggggaattatacttcactcagggatcatacgcaaaagccgttccttactatgaagagacggcaaaagaacggcacgaaatcggcggcgtaaatgttcatcagaggctggctgagtcattgagcgcggcgggtgaatttgaggaagcgatttcatggtatgaaaaagcggcggcagaacatacagaaccgaatacgattttcgggtacgggttcacagcctatcaggcgggaatggtcaaaacagccatcaagcagctgtctgatttaaaagggcttgatccttcctattcatcgctttatatgccgcttgcaaaaagctacgaggcagaaggcatgtatgaagatgcattaaaaaccgctaaagaaggtattacttacgatgaatacaataaagagctttttctctatgcggcgaaaatggcgttaaagctcggcaacgcagaagaaggcaaaaagcttcttcaggaagcgctggcgctcgatccgggttacgtggaagcgctccatacgcttttagccgtctatcataaagaagaaagctttgaagagattattgatctgattcaggaagtccgcggctacggagaagaagatccgaaatacaattggtatttggcgggtgcctatacaggccttgagcaatacgctgaagcgaaaaaaagcttcgaagctgcgtatctccattatcaggatgatcgggatttcttatatgaatacgctcacttcttattggaagagggtctccagaaagaagcgctgccgcttttaaaacaagtgctttcaatggatggaacaaacgaagagcttgaagaaacaatcttacggatagaggatgaatttttaagataagcaggattttggaccatgcttgctgaatgtataagtgatgtcagattatacgatcgatagaggagggaattacatgcagacccctgtttctgtcaatgaaaaaaaggattttatccgttggtttttaaatcattatcagcttaaacgccgggagtgcgtctggattttaaattatttaatgagtcatgattcattaatggaaaaagtccattttgtagaacaagctgaattttgcccgagaggcattatcatgtctactcattgcgttgatgaggtgccgtttaggttttacaaagaaaatgtcatgaccacggacgcggaaaaatcttttcacgacatccggttaaataaacagcaggatttatttatccagctgaatttccgttcggcctacagctcaccggaatatgccgctgttcttgaatcaaatccgcatctgccgaaagacctgtttgaaaataaacaggatcaggggatggctgaaaaaatattagaacatgccatttccacttttcagcgggaaaagctgcttaaagatatcgacgaggcgctggaccgccacgacaaagaaacatttgaaaagctatcccgccaattgaatcagctcacataaatgacagccttgcagaatatgcaaggcttgttgcgtaaagaggaggaacgagacatgagatggagggccgctgatgccgatgcctatttacaatctgcggattacattgataccgctgtcattccgttaatttccataatgtcttcaggaggcttaaaagaggccgttgaacagggggaaagcacccaattgctttctgaagagcttgagcgccaattgaagggacgggtatatttattcccctcttatacatatgttgatatagaccaatcacaaatcgccctgcttcaaaaactcaaagaagaggtgatgaccaacttccggcacgccttgttcctgacggcagacgaaaaatggaaggattctgaaatagggtctgatgtcatatacatacctgccgttccgtttgaacatatgaaagactctttaaagagaaaaatagcggatgacaagtgcggagaaattttgaacgttttgttacagaagtggaacaattcttaaaaactccatacatcccgcaaaacacccgttttgcctctgttgaccttgctgaaagattcatatattatgagggtgtcaaatctctgaattattttctattttagttaatttttggtcaatctttaggggggggaagagatgggcggaaaacaagatatatcgagaagacaatttttaaactatgcgctcaccggcgtggggggatttatggccgccagtgcgcttatgcccatggtccgttttgcgctggacccggtattaaaaccgacgggagatcaaaaaatggtgcaggttgtcagtgtggatgagctgacgaaggagccgaagcggtttgactttaaaattcatcaagtcgacgcctggtacgaatcggaagaatccaggtcagcctgggtttacaagcatggggatgaaattatagcgctttctccgatctgtaaacatttgggctgcaccgtaaactggaacaatgatcctaaaaatccgaacaaattcttttgtccctgccattacgggctgtatgaaaaagacggcacgaacgttccgggcacgccgccgctcgcgcctcttgaccgttatgagcaaaaagtaaaggacggctttttgtatcttggaaaagcaaagcctaggggggaagggtgacatgctgaataaaatttatgactgggtggatgaacgtctcgatattacgccgatgtggcgggatatcgccgaccatgaagtgccggaacatgtaaatcccgctcaccatttctcggcttttgtctattgtttcggcggtttgacgttttttgtaaccgttatccaagtactgtccgggatgtttttaacgatgtattatgtgccggatataaaaaacgcgtgggaatctgtgtattatttgcagaatgaagtcgctttcgggcagattgtaaggggtatgcaccattggggcgcaagtttagtcattgtgatgatgtttttacatacgctgcgggttttctttcagggagcttataaaaagcctcgggaattgaactggatcgtcggtgttctgatcttttttgtgatgctcggtctcggttttacagggtatctgcttccatgggatatgaaggcgctgtttgcgacaaaggtaggtcttcagattgcggaggcgacgccattgatcggagcgcaggtgaaaactcttcttgccggccaccacgatattgtcggcgcccaaacgctgacgagattttttgcgattcacgtattttttctccctgccgctttgtttgcgctcatgggcgcccactttgtcatgatccgcaagcagggaatttcaggaccgctttaatacaaatctgatataaaagggaggggatgacatgcaccgggggaaaggaatgaagtttgtaggagattcaaggataccggctgaaaaaaaaccgaatataccgaaagactattcagagtatcctggaaagacagaggcgttttggccgaacttcctgctgaaagaatggatggtcggggccgttttcctcgtcggatttctcgttttaacgattgtgcacgagccgcctttggaacgggtggcggacccgacggatacagggtatattccgctgccggattggtattttctatttttataccagctattaaaatatgaatatgccgcagggagctacaccgttatcggcgcgatgattataccgggtcttgccttcgggtcgctgcttttggctccgtttctcgacagggggtctgaaagaaggccgtggaagcgtccggttgcggtcgggatgatgcttttggcgctttgcgctacggtctttttaacgtggcagtcagtcgcgacgcatgactgggcgaaggcggaggagcaagggaaaatcaaaaaagaagccgccattgatactgaatcagatggttataaggtatttaaagaacaaggatgtatttcctgtcacggggataatcttcaaggcggaagcgccggtccgtccctggtcgataacgggctgagcccggaagaaattaaaaaaatcgccgtcaaagggaaagggcagatgccagccggtatttttaaaggaaatgacaaacagcttgatcagctggcgaagttcatttctgaaacgacagcgaaataacgtattgtgaagtagacaatagcaggatatacttttatgaaaagagctgaccggatgtcagctttttttgcatgatacatactttttacggactgagagttgatggtatgaggtggatttcttatcttttagggttgcgcggcatgcttctgcttgttcttgccgttaattttatcggtacggtgtacggctattattggtatgtgcctcagcttgcggacacgccgttccgatttctgatatttgtgcctgacagcccgacggcgacgtttttcttcctgttcgtgcttctggcttttctcatgggaagaaacgcgccgctgtttgaagcgctggctcttgtaacccttataaaatacgggctgtgggcggtcggaatgaatgtctttgtgctggtcaaaatggggcagatgccttgggaagggtacatgctgattgcttcacattttgccatggccgttcaaggcgttttatacagcccgtattttcggttccggttatggcatcttgccgttgccgctgtttggacgcttcataatgatgtcattgattatcttttcggcatgatgccccgctactcaatgctcaatgactatatgcaagtaatcggctatgctacattctggctgagcatattttcactcggccttgcatactatttggtgatttccaaaagacggataaagcttgacttacactgatagaatcttggtctaaccttgtcccgctcctcatattctgtaaagagaaggagtgggagggacctctatgaaacgaaagctgacgatctgtcttttacttgctcttatgtgtttcatcacaactgccaaagctgaagatgagggcggtctcaaggaactgaacgacctttcggataccgttttccaaatgacgcggcattcgcagtatgatgaggctctgcaagtgcttggctactttaagaaaaaaatggcacacgtaaactcactgagcggcgccgaagtcaggcaggtgactctgggtttcaatgatttaatgcgcgttctgaaacaggcagacgcctcagataccgaaaaaatccgggctgccgcccagttcaggttggtaatggatgcgatggaagaccactccgatccgctgtggggttcgcttgaaagaccgattatggcgacattcagcgccttaaaagaagatgtcagcggaaacggaagtgaaaatttcaatgaaaagtggaatgaatttatatcattatatgatttaatttatcccagcctgacaatggatgtgtcggccggccagcttgatacggtggcgaaacatatcgaggtgattgagcaggacgggtttcagcagatgacaaaaggaacaaagcttgagcgtctgacgctcctgcagcaggatttaaagcgggtttttgacaaggtggagcgggatgacgctgacccttcgctgctctgggtcattctgacaacaggcggtatcattattactgcgctgacatatgtcggctaccgaaaatacagagcggaaaaaaagaaagagaaaaagcgtgagtatcctaaatctaaataaacagaaattgctgtaaaggagctaagtcagtgaaaaaactcatccagcaattggcttcaaaacacctcccgcagccgatcagaggcagaaaaggggcgactgacgaaggaccgcgaaacctcgcgcgtgactttcagaatcctgacatgctcgttccgccctcaacggatgcaggaacggttcaaaacttgaaattctcattttctgatacgcatatgaggcttgaagacggcggatggtccagagaggtgacggtcagggaactgccggtatccaaaaacatcgcggcggtaaacatgagactgaaaccgggagctgtgcgggagcttcattggcataaagaagccgaatggggatatgtgattaacggagaagtccgtttaactgcggttgatcaaaatgggcggaattttattgataacgtaagtgaaggggatctgtggtattttccttccggcattcctcatttcattcaagggatggaacggggaagtgagtttttgcttgtctttgatgacggctctttttcagaaaacagcaccttttcagtaacggactggtttgcccacaccccgcgcagcgtgctggaggcgaacttcggtgttcccggatatgacttggcctacattcacaagaaagagcgttacatgttccagctggaaccgcctcccccgattgaacaggcagcagtttcttccccggaaggcaccgttttggagccgttcagctacaagctttcccggcaggagcctcttgttaccagcgggggaagagtaaagattgtcgattcaaaaacgtttaaggtgtcaaaaacgattgccgcagctcttgtggaggtcgaacccggaggcatgagagaattgcattggcatccgaatacggacgagtggcagtattatctttcaggagaagcgaaaatgacggtgtttgcggcggagggaagagcgcggacatttaactatcaagcgggtgacgtaggatatgttccttttgcaatgggacattatgttcagaataccggtgacaccgtgcttcgctttctggaaatcttcaaaagcgaccgtttcgaagacgtctctttaaaccaatggctggcactgacaccgcagcgcttcgtcgagcagacgctcaatgtcagtccggcattcgtccgccgattgaaaaagaaaaaatcaccggttgtcaaatggaaacaccaacagtaaaggcggcaaaagccgcctttttattatcgtctgatcggatttttattttcatcaagcgtaaatccttcgccgagcacatcatggacgtcgcttactgcaacaaaggcgtgcgggtcaacggaagtgatgacgcttttcaaaagcacaatttcgtttttcggaacgacgcagtaaagaacgtccctgtcttcttttgtatatgatccctgtccttttaaaacggtgacgccgcgctccatctcttcaatgattttttgctggatcaaatcgtttttcgaagaaataatcgttgccccttttgcggcatagccgccttcctggataaaatcaatcaatctcgcagcgacaaaaacggctacaagcgtgtacatcgcttccttgtaagaaagatacgtaaacaaagaaagcaaaatgacacaggcgtcaaaggcaaacatcgtccggcccatcgggattccgaaaaatttgttgatcagcctggcgatgatatcgaccccgcccgtcgtgccgccgtatttaaaaataatgccgagacccgcgccgataaatacaccggcgaataaggcagccagcgctaaatcatgggacagcggcatatgaatttcgtagcgctgaaaaacactcagaaaaacagaaagagagacggtgccgatcagggtatagacaaacatcgtccggccgagcatacgccagccgatgaaaaagataggaatgttcaataccaggttggaaatagaagggctgatgtggaataacgcatataaaagcagcgtaatgccggtaaatccgccttccgccaaattgttctgcatattaaagtgaaccagtccgaatgaaaaaacagcggcgccgattaaaataaagcaaatgtttttgattctgatttctccaagcattgcatcaaaccccttttccttccataagattgcgtaaatattatagtggatacaaaagaaaacagcaaactgccgtttttaacatttgtcaaatgtacttgaattagctaacatggaagagatgacaggaggtattcgcacagtgagtgacaaaacgatgaaagacttacaagctgaggtcgatgaatatatcggccaattcaaagaaggctatttcagcccgcttgccatgatggcccgtctcacggaagaactgggcgaacttgcaagagaagtcaaccattattatggggaaaagccgaagaaaacgacggaaaatgagaaaagcatggaagaggaaatgggcgatgtgctgttcgtcctgatctgcctcgccaactcccttgatatttcattggagaaagctcataaccgcgtcatgcataaatttaatacacgtgataaagaccgctggactagaaaagaagaaggaaagtaggagaaaccatgtcaaatgaaaccattaaagtcgtcattgccggaccgagaggcagaatgggccaggaggccgtaaaacttgccgtccgcacgcctcattttgagcttgtcggcgccattgaccatacatacgatcagcaaacattgcgggaagtgatgtcagctgattcagacgctcttatttatacggatatccgcgcatgtttccaacaaacaaaaccggatgtgctgatcgatttgacaacgcctgaaatcggcaaaaaacatacgaaagccgctcttgaacacggcgtccgccccgttgtgggaacgaccggattttctgaagccgatttagaggaacttcaagccttgactgaagagaaaggaatcggcgccatcatcgctccgaactttgcattgggtgcagtgctgatgatgaagttctcacaaatggccgccaactattttgaagatgtagaaatcattgagcttcatcatgatcaaaagctggatgccccgagcggaacggcgctgaaaacagcggaaatgatctcaagcgtccgtacagaaaagcagcagggccatcctgatgaaaaagaaattctgccgggcgcccgcggtgctgaattaaacggcatccgccttcacagcgtgcgtcttccgggccttatcgcccaccaggaagtcatgttcggcatggacggccagacgctgaaactgcgccatgactcctataaccgggcttcctttatgtcaggagtgaagctgtcagtggagcaagtgatgaaaatcgaccagcttgtatacggactcgaaaatattatcgactgaatcggcaagggggagaacatcaaatgaaaatcgctttgattgctcacgataaaaaaaagcaggatatggttcagtttacgaccgcatataaagatatactgagccatcatgagttatacgcgacaggtacgacgggcctgaaaatccaggaatcgaccggattgtctgttgaacgttttcaatccggcccgctcggcggagatcagcaaatcggcgcattgattgcagcaaatgccctggatctcgtcatttttctgcgcgatccattaactgcgcagcctcacgaaccggatgtctcggcgctgatccggctgtgtgacgtatacgcgatcccgcttgccacaaatatgggaacagcggaaatcctcgtccggacactggacggcggggcatttgatttccgcaatcttgtgcgcggaggagagccgaatgtctgaacacgttgatattctggcgttcggcgcccatagtgatgatgtcgagatcggtatgggcggcacgatcgcaaaatttacggctcaaggaaaaaccgcggtgatatgcgatttgaccgaggccgaactatcatccaacggaacggtagggataagaaaagaagaagcggcagaggcggcacgaattctcggtgtaaaagagagaatccagcttacgcttcccgaccgcgggcttttgaaaagtgaggacggcatccgccggattgtcagtgtcatcagagcctgccggccgaaaaccgttttcatgccttatccgaaagaccgccatcctgaccacggcaatgcggcggctttggtcgaagaggcggtgttctcggcgggaattcataaatacagagatcatcaggaactgccggctcataaggctcagcgcgtatactattatatgatcaacgggtttcaccgtccggactttgtaatcgacataacggaaaccatcgatctgaaaaaagaaagtctgcacgcctatcaaagccagtttattcctacggcgcagtcagtgaacacaccgctgaccaacggttatatcgaaatggtggaagcgcgggaaagactgtatggcaaagaagccgggacggggtatgctgaaggcttcttttcaaaacagcttcccgttttgaatgatgatgtttttgggggcggacaatgagaccattaaaaatagggattacatgctacccgagtgtcggaggctcgggtattattgcgacggaactcggcaagctgcttgcggaaaaagggcaccaggttcatttcatcacatcaagcatcccgttcagattaaatacatatcatccgaatattcattttcatgaggtggaagtcaaccaatacgcggtatttaaatatccgccttatgaccttacgctggcgagcaaaatcgccgaggttgccgcgagggaaaatcttgatatcatacacgcgcattatgcgctgccgcatgcggtatgcgcttatctcgccaaacagatgctcaagcgcgacatcggcatcgtgacgacgcttcacggtacagacatcactgttttaggatatgatccgtcattaaaagatttaatccgttttgccatcgaagcgtctgacagagtgactgcggtatcaaccgcgcttgccggagaaacatatgacttaatcaagccggataaaaaaattgagaccatctacaactttattgatgaacgtgtttatcttaagaaaaatacagagagtataaaagagaaacatggcattttgccggatgaaaaagtcgtcatccatgtttcgaacttcagaaaagtaaaacgtgttaaagatgtcatccgcgttttccgtaatatcgcagccaaaacaaaggcgaagctcctgcttgtcggcgacgggccggaaaagtgcgtcgcttggcagcttgtcgaaaaatacggactgcaggatcaagtgctgctcctcggaaatcaggacagggtggaagagctgtattccatcagcgaccttaagcttcttctgtctgaaaaagaaagtttcggactcgtcctccttgaggccatggcctgcggcgtgccgtgcatcggaacaaatatcggcggaatcccggaagtgattaaagatcaagtaagcggttttctggtggaagtcggcgatattcaggcggcatctgaaaaagcgcttgccgttttagaagataaacagctcagcaaacgattgactgatcatgcgctgaaaatggtggagaccgccttttcttcgcaaagaatcgtcagtcagtatgaacggatttatgacgaattggcaggaccggagtgatcttatggaacaagaatttgtcaaagccctccccatccttcgtcatctgatgaaggcgggccatcaggcgtactttgtcgggggagccgtcagagacagctatatgggacgaaaaataggtgatgtggacatcgcaaccagcgcttcgccgaatgaggtggagcgtctctttaagcggactgtcgatgtaggaaaagagcacggcaccgtcatcgtcctgtgggaagatgaaacctatgaagtcaccacttttcgtgccgaatcagaatataaggactaccggcgccctgaagctgtgcggttcattacttctttagcagaagacttaaagcggagagacttaacgattaatgcgatggcgatgtctgccgaaggagagctgcttgattatttcggaggcgcgcatgatatcggacaaaagctgatccgtacggtgggtaaccctgaagaccgttttcgggaagacgctctgcggatgatgagagccgtccgctttatgagtcagctcggctttctgttagaaaaagaaacaagagaggccatcataaaagacagggagcttttggcacatgtatcagtagaacgaaagaccgtcgagtttgagaagctgctgcagggcgcttcctcacaagaagcgattcaaacgatggtgcaaacaggtctgttacaagagctgcccggcctttccggttatgagcagcaaatgcttgaagcaagcggctttccgttttcttctttagatgcacgcgaagaacgctgggcagcgctgttattgtttctcggtctttgcccgaaaagcgccgaggcgtttttaaaacaatggaaactgccgggaaaagtcataaaaaaagcggtgcaaatcataagcgtttatccggtgcagctggaagcggaagcgatgtaccgggcgggagaggcgctgttttcagccgttaaaatcgggatgctgaaaaagcataagacgattgatgaacaaaagctgaaagaggttcagagcctgtatgagcagctgccgatcaaaagccttcgagacctcgacatttcaggcgctgatctgatggagctcagaaaccgccgcgcgggtaaatgggtggccgaagaacttcgccggatcgaagaagcggtattggcagggaagctccctaaccgaaaacatgatataaaggagtggctcgcatcatgggatcaacattaagaacccgattaattgatttattttctgaggcgggtgacggctttatctccgggcagaaaataagtgacgcgctcggctgctcgagaaccgccgtttggaaacatatagaggagctccgcaaagagggctatgaggttgaggcggtcagacgaaaagggtacaggctcattaaaaaaccggggaaactcagtgaatccgaaatccgtttcgggctgaaaacagaggttttgggcaaacagcttcattaccgggacgtcctgccatccacccaaaaaaccgctcatgaacttgccaatgacggcgcgccggaaggaacgctcgtagtcgccgataaacaaacggcaggcagaggaagaatggccagagtatggcattcacaggagggaaacgggatttggatgagcctcattctgagacccgacgttcctttgcaaaaaacgccgcagctcaccctgttatctgccgttgcggtcgtacaggccatcgaggcttttacaggtgtacagcccgccattaaatggccgaatgatttaatgattcacagcaaaaaagccgtcgggattttaactgagctgcaggcggaagaagaccgtgtccgttcggttattctcgggatcggcatcaacgtgaaccagcaggaaaaagattttcccggcgagcttcaggacattgcgacaagcctcagcatggaagccggcgaaaaaattgacagagcgggtctgatacaagagattctgctgacttttgaaaaacgctatcaggattacttgaaccacggctttacaccgatcaagctgttatgggaaagctatgcggtcggactggggaacgagctcagagcgagaacgctgcaagggacgttttacgggaaatcgctcggcattgatgatgagggagttcttctcttggaaacgaaagacggtataaagaagatatattctgccgatattgagctcaattaatcttagttggtacaagcctcgtgaatttggtatacttcctatgggcagtatcataatgaactgcacctgatcagcagaacagagattacgaaaagtctgccttgatccaaaaaaggactgggacagagggatgacattcgccgaacgttaaacaagtggggatccttcttattttacagaaggcttttttgcttgcgaagaattggcggctcatctcctcaccgtttagaggaggagaaacagaatgaaaacaaaactggatttcatgaaaatgaaggaaaacggagagccgatcgtgatgctgaccgcttacgattatccgcaggcaaagcttgcggaacaggcgggagtcgacatgattttagtcggggattcgctgggaatggtcgtgctcggactcgattcaacagtcggcgtaacggtcagtgacatgattcaccatacaaaagcggtaaaacgcggtgcgaaaaatacgtttatcgtaactgacatgccgtttatgtcttaccacctttcaaaagaagatacaatgaaaaacgccgcggccattattcaggaaagcggcgcggacgcgttaaagcttgaaggcggagacggcgttttcgaatccatccgcgcgctgactctcggcggaattcccgtcgtcagccatttaggcctcacaccgcagtctgtcggcgtattaggcggatataaagtgcaggggaaagatgagcaaagcgcgaaaaagctcattgaagacagcatcaaatgcgagcaggcgggagcgatgatgctcgtgcttgaatgcgtgcctgctgaactgactgctaaaataaaagaagaagtatccattcccgtcatcggaatcggagccggttcaaaagcggacggccaagtccttgtctatcatgacgtcgtcggccacggcgtggacagaacaccgaagttcgtgaagcaatacgccaaaatcgacggcacgattgagtcggccctcagcgattacgtccgtgatgtgaaagaacgggttttcccggaagaaaagcattcctttcagataaaccaaactgtgctgcaaggcttgtacggaggaaagtaagcgatgaaacaactgacagaaactcaacagctgaaagaattgattgcacaataccgctcagaaggccggacgatcggattcgtcccgacaatgggttttcttcacgaaggacatctgacgctggttgaaaaagcaagcaaagaaaacgatattgtcgtgatgagcatctttgtcaatccgactcaattcggaccgggcgaggattacgaggcatatccgcgagatttaaagcgcgatgcccggcttgcagaacaggcgggggcagatgttttgtttacgccgtctccaagtgatatgtataaaggcgagcaaaatgttgccgtgcaagtgaaaaggagaactgacgtgttgtgcggcgcctcccgcgtcggccattttgacggagtggccactgtgctgacgaagtttttcaatctcgttaaaccgacccgcgcttacttcggcctgaaagatgcccagcaggcagcggttgtggacggattgattgaggatttctttatggatatcgaattggttgcagtggacacggtcagagaagaagacggacttgccaaaagctctcgcaacgtttatctgactgagcaggaacgcaaagaagcgccgatgatctataaagcattgcagcaaggtgccgaactgatcagagacggtgaaagaaatccggaaaccgttataaaaaccgtcaccgatatcatcgaaaacacaagcggcgtcattgattatgccgaactgtacgcttatccggagctgactccgcttaaaacattaaacggcaaggtcattctggcctgcgccgtccaattttctaaagccagactgattgataatatcattattgatattgatgaatgggagagatcataatatgtaccgcactatgatggccggaaaactgcaccgcgctaccgtgacggaagccaatttaaactatgtcggcagcattacgattgatgaagatcttttagatgccgtcggaatgctcgctaatgaaaaagttcagattgtgaataataacaacggagcgagacttgaaacgtatattattcccggtaagcgggggagcggcgtcatctgtttaaacggagcagccgcccgtctcgtccaagaaggagataaagtcattattatttcttatcaaatgatgtctgatcaggaagcaaaaagccatcagccgaaggtggctgttctggatgatcagaataaaatcgagcagatgctgggccaggagccggcacacacgattttgtaaaagagcccccttcatgggggttttcttttaagatttgggggcaaaagctgtttttccgctccatttctcaacaaaacgtgttacacttttctcgtatgcaagaattgaggtgtccattttaatgaacaaacaacggttcgttgtcatagatgtcgaaacaacaggaaattcgccgaaaaagggcgataaaatcattcaaatcgcagcggttgtcattgaaaatggacaaataactgagcggttttcaaaatatatcaatccgaatcaggtcattccgccgtttattgaacagctgaccggaatttcgtccggaatggttgaaaatgaactgccgtttgaagcggtcgcagaggagatttttcatctgcttgacggcgcgtattttgttgcccacaatattcatttcgacctcggatttgtccggcatgaactgagcgaagcgggctatgagctgccggattgtgaagtgcttgatacggttgagctttcgcgtattgttttcccggggtttgaaggatataagctcggtgagttgtgcgcggagctgaatattgttcatgaccgccctcaccgcgcagacagcgatgcggaggttacgggactggtctttttagacattttacataaactgaaacatttgcctttaccgacgttaaagcagcttagaaggctttcacagcattttatcagcgatttgacgctgcttttggattcttttatacatgaaagcaggccggcggaagaaaagagctgcattccatacgcctctttttcaattaaagagcccgatcacattccggtttcccgtccggtgaatgcggccattgaccttgaaaagtggaacgaagaaaaagaacagatcttatccggcatcctcccccgctatgaaaagcggaaagggcagctttcgatgatggatgaagtgcttggcgccttccgcaatcgggagcatgcgctgattgaagcggcacccggcatcggaaaaacgatcggttatctcgttccggctgttttatttgccaaagcggagcagactcccgtgattatcagcacgtactctactcttttgcagcagcagatcatgtctaaagatcttccgcttttggagcgtatgtttccttggccggtcaaagccgctattttaaaagggaaatcacattatctgtgcctgcctaagtttgaacatattctgcatgaggaagatgacaactatgatgcggttttgacgaaagcgcagcttctcgtctggctgacggagactgaaacgggcgacgccgctgagctgaatcttccatcaggcggcagattgctgtgggagcgcatggcttacgatgagaattctttttttaaaaaagggaaggactcggctgccgggttttatgaacgggctaaagaaaaagcgcaggccgcagatctgattatcacaaaccatgctttgctgttttcagatcaaagcagtgaaacgaaaaaactgcctgcaagcggaacaatcatcattgatgaagcgcatcatttcgaacgcgctgccagcgagcacctggggaagagagcttcatacatcggactgcacacaaagctcagccgaatcggaaccttaaaggaacacggactgttaaagcggatgagaaaactgttttatacgtatgaactgccggcggaaagtttttttgacgccgatgagtggatgaagcatattcaatcggaaagcgacgcatttttcagttcagtgcattcttttgtcaaacgaagaaaacctaaagacgatctgaaccgtctcgtctatagtctcaatcataaaagccaggataaagggtttcacatgataacggacggagcggagcggctttgcgcgatgctggatcagctgcttgacatgttttcagtacaggagaaactgttacatcaaaagcttgaacagatgaaaagcggagcggcttttttagcggccgaatatgtaaagtgtatcagggggctgaaagaatatcgtgatacgttcagcaggctgctgtttgaaaatgatgagaaagaagccgtttgggttgaaattgatgcgaagggcgcaaaaaatgccgtcagcatctatgcgcagcctttggagcccggtgaaatgctggcagaccagtttttcgcccgcaaaaaaagcgttgtgctcacatcagcgaccttaatggtggagcagtcttttcaatttatgattgaaaggctcggacttgcggatttttatccgcgcaccaaaagcatcccgtctcctttttcttacgatgatcagatgaacgtcatcattccgaaagagatgaaatccgttaaatatgacggagagcgggaagtcattgagcatattgccaagtatgcagaaatcatgtcaaagggaaaacagccgaagatccttgtcctgtttacgtctcatgatatgctgaaaaaagtgtatcaggaactgaaactcagtatggagatatcaggcattcagcttctcgcccaaggtatttcgggcgggagtcccggtaaattaatgaaaacctttaaaacggcaagccgggcgattttgcttgggacgaatcatttctgggaaggcgttgattttccgggggatgaattgtcaaccgtcatgatcgcaagacttcctttcagggcgcctgacaatccgcttcatgccgcaaaatgcgaatttgccaagaagcaggggaaaaatccgtttcagacgatttccctgcctgaggccgtgttaacgttcagacaggggatcgggcgcctgctccgtacggcgggagacaagggaacgatcgttcttttagatcagcgtgtaaagacggcgggatacggacggctgtttcttgaagcgctcccgacttcatctcttttggaactgacggatgccgaaatggcagcttatgtcagccaaacggaataaaagccgcataaacgcggctttcgtggtgtgggatgaggaattgtttttatagtaaaagcgggttcatgccgccttgtgactttattatgccgcgggcgcatcccgttatgactaacaaaatttgttcgaccgatggagggtataaaaatggaaagcaaaattgaaattctgtcaacgattaatgtggagcattcagatgatttatataaaatcgtcgatacattaaaccggactttgaaacgggacaatctgatgttcggccttgcgctagacgaagaaaatcaaaatgaagcggtcttcaccatttatcgcacataggtgaaaaagatgagaaaaaaagcattaatatttacagccgtatttggtattatttttttagcagttcttttattttcggccagcatttttaaatctgcaatggctcaaaaagaagaaggccacgaaacagctgccgcagccgctaaagaaaaaacggagctgacagatgctgagaaagtggagacctttgtcggcaaacagaaatattatgttgttaccggaacggataaacatggaaaagatatgtatgtatgggttccggccgacaaaaaagcaaaaattctctcaaaaaaagccagtgacggcatttcaagcggcaaggctgccaagatcgttcgggacgaagggcttgtttcgaagctgaatggcgttcacccggcgagagaaaacaatgttccgttatgggaagtgacctatatcaacaaaaacgggcagtatagcttcagctatgtggactttacaagcggcaagattcttaaaaacatcacaccgtgagacgtattagggggagttcaagttgaaattggcaaaaagagtatccgcattaacaccgtctgcaacactagcaattactgcaaaagcgaaagggctgaaagcagaaggccatgatgtcatcggcctcggagcaggagaaccggattttaatacgcctcagcacattatagctgccgcggtgcgttccatgaatgaaggccatacgaaatatacgccttcaggcggtctgccggcgctgaaagacagtatcgcaaaaaaattcaaaaacgaccaggggattgaatataagccgtcagaaatcattgtctgcaccggagcgaaacacgctctgtatacattatttcaggttattctcgatgaaggggacgaagtgattataccgactccttactgggtcagctaccctgagcaggtgaaactggcaggggggcgtcccgtctatgcagaagggctggaatccaatcagtttaaaatttcaccggagcagctgaagcaggctatcaccgagaaaacaaaagcgctcattatcaattcaccgagcaacccgacaggtgttatgtatacgaaagaagagcttgcggaactcggaaaagtgtgtctggagcatggcattctgatcgtttctgacgagatttatgagaagcttacatacggaggaaaaaaacacgtctcaatcgcacagctttcagatgaattgaaagagcagacgatcatcattaacggcgtgtcgaaatctcacagcatgacgggctggaggatcggatatgcggcgggttcggagacgattattaaagcgatgacgagccttgcgagccacagcacatcaaatccgacgtccatcgctcaatacggcgctattgcggcctataacggtccggctgagccgctggaagagatgagacaggcatttgagcacagactgaacaccatttacgctcagctcagtgagattcccggattcacctgtgtcaagcctgaaggggcgttttacttgtttcctaacgccaaagcggccgcagaaaactgcggattcaaagatgtcgatgaatacgtcaaggcgcttctggaagaagaaaaagtcgccatcgtgccgggttcgggtttcggttcaccggacaacgtccgcttatcttacgcaacgtcacttgatcttttagaagaagcggtcgaaagaatccgccgcttcacggaaaaacacagctgattctgaaaaagcggcttttaaagccgcttttcacttgcattgaccccgttagagtagaacgggtataataaagtgatgaaaaaagagattcaggcagattcctgaatgtctttcttgttctggagggaaagagtttgaaaacaacaatcaaccaagtgtataaacacacaggcgaggaagtaacgattggagcttgggtcgctaataaacgctcaagcggtaaaatcgcatttttacagctgagagacggtacaggcttcattcagggagttgtcgttaaagctgatgtagaagaagacatcttccaaatcgcgaaatcagtgacacaggaaacgtcactttatgtaaaaggaattgtgaaagaggacgagcgttcaccgctcggctatgagcttgctgttacatccattgaagtcattcatgaagcgactgattatccgattacgcctaaagagcacggtacggaattcttaatggatcacagacatttatggctccgttcgaaacgccagcacgcaattatgaaaatccgcaacgaaatcattcgtgcgacttatgaatttttcaacaaagaaggcttcgtgaaagttgatccgccgattttgacgggaagcgctcccgaaggcacgactgagctgttcgcgacgaaatattttgatgaagacgccttcttgtctcaaagcggccagctgtatatggaagcagctgcaatggcgctcggaaaagtattctctttcggaccgacgttcagagcggaaaaatcgaaaacgaaacgccatctcatcgaattctggatgattgagcctgaaatggcatttgttgaatttgaagaaaaccttgaagttcaggagaattatgttgcatacatcgtacaaagtgtgctggaacattgtaagatcgagctgaacacattaggaagagacacatcgaagcttgaacaaatcaaagcgccattcccgcgcattacgtacgataaagcgattgaattcctgaaagaaaaaggctttgacgatattgagtggggagatgacttcggtgcgccgcatgaaacagcgatcgcagaaagctatgacaaaccggtgtttatcactcattacccgacgtcattaaaaccgttttatatgcagcctgccaaagatcgtgacgatgtcgtgttatgtgccgacttaattgctccggaaggctacggggaaatcatcggcggttcagaacgcgttcatgatatggatttattggaagaaagattaaaagaacacggtctggattcagatgcttacaaatggtatgctgaactcagacaatacggttctgttccgcactccggcttcggccttggacttgagcggacagtggcttggatcagcggagcgcctcacgtgcgtgaaacgattccgttcccgagacttctgaaccgtctatatccgtaatagttttaaaaaacgaagtctcctgcaagggagactttttctaagtaaaggggaaagctcccggagataaccttttacagtaagaggtgtaaggatgaaaaaacagcaatttatagatatgcaggaactcggcatttcaagcattcccaacctgctgctgacacattaccggcagctcgggctgaatgaaaccgaattgatcctgcttttgaagattaaaatgcatttggaaaagggctcttattttccgacgccgtttgaacttcaatcaggcatgtccatctctgctgaagaatgtacaagctgcctgagaatgtttattcaaaaaggttttctgtttattgaagaatgtgaagaccataacggcataaagtttgaaaaatattctctgcagccgttatgggcgaagctgtatgattacatgcagcattctcaaaatgaaacgcaggaaagaacatcagaaagagaacaaaaaagcctgtataccatctttgaagaagagttcggaagaccgctgtcgccccttgaatgcgagacgctggccatatggcaggatcaggatcagcatgatgcgattctgattaaacacgccttaaaagaagctgttttatcgggaaaactcagttttcgctatattgaccggattttatttgaatggaaaaagaacggcttcaaaacggttgagcaggcgaaggcgcacagccaaaaattccggcgtgttcaaacgaaacaaaatgatccgcaaaaagagtatacgaggcaggtgcctttttacaattggctggaacaataacatgagaaggggagaaacgtgttaaatttaaagcagattgaatattgtcttgaaaaaatcggcgatatgtttccgcacgcagaatgtgaacttgtccattcaaatcctttcgaattggttgtggcagtcgcattatccgcgcaatgtacggacgctctagtcaacagagtgacaaaaacgctatttcaaaaatataaacggcccgaagattatcttgccgtatcgctggaagaactccagcaagatattaaatcaatcggcctgtaccgtaataaagccaaaaatattcaaaagctgagcaaaatgatcatcgaagagtacggcggagaagtgccgaaagaccgggatgagcttgtgaatctgccgggtgtcggacggaaaacggcaaatgtggtcgtgtctgttgctttcggcgtacctgcgattgcagtagacactcatgtggagcgggtctctaaacggctcggtatctgccgctggaaggactctgttttggaagtagagaaaacattaatgaaaaaagtgccgaaaaaggattggtctgttacgcatcacagattaatatttttcggcaggtatcattgtaaagcgcaatctccccgctgtgcggaatgtcctttgcttccgctatgcagagaagggcagaagcgtgacaaaaaagggctggtgaaacggtgacggcgattgacattctggcaggctatgaaacatacctgcgcagccttacggacttggaaaaccttgagatcaaaacggcgctgcgccgccatccgctgtatatggatttcagcggtcagccaaccgtgcagccatggagggaaaggggcgaatatgtcccgtttctgtttcagatttggaacgaaatgaaagagacgctgcttcccgtttttcaaacaagaaaatcgagatgtgatcaaaatgacatgctgaagggaattgcctgtctgattgccgcttttcactggacggcaggggagcgggtcacatcactcgattggtctgtgcttgaaacaaagcattttcccgccgaaccgatcaattgggcggagcgaatggcgtttattttaacaaaaccgactcaatatcactcgtttattcagcttgatgaattgatgacggagatgaagaaacaatatcataaatatgaagccatgaacaaatgttaaaaacctccttttctcataaggaggattttttgtatgaaaaaaatccttcacctgtttgaggtgaaggatttcgttcgctaatgagcggaatttgactggatggttgacgaattggactgcccattgatatttgaagatgagtctttgtttttgtccgtttgaccgctgtcaggtttatttgagccgtctgaaccggaatcggaatcattatcagagccgttatcttgctgtccgttgttatcggtcccgttaccgggctgattctgattgttgttatctgtttgatccttatcggattgatcctgatttttatccgggtcatcagttggtgtttgatccgatccgtcaggcgtatctgtctgattgtcatctgtgtttgaatcatcagtttgcgtcttgtctttgtctttatcttcatcagacttctgttcatcgtcagtcgctttatctttatctgcatcgtcttcttcatctttcgggactttgaaagatgctgatgccgtatcgctttttccgtcatcgttttccgctgtcacctggaagctgtatgtggagcctggcgtgacatctgagacgacggcttcttttgccgaactgttttgaatgtcactgtagcttccgccgtcaacggattgtttgacattgaatgttgcatcaccgtcataattccagcttaaggttaatgattttttatctttgtcgtatttcacttgcaatcctgtcggtttatcggctttttctttcgtgtacgttttagaaacggcagttggctgcgttcctttcacgaagtactccgtcacttttttatcatccggcgtgttcggtccggctaaagcggcaggattcgagcctttctcaactgtttcttttacgacgctgtcaggctgcttgaagcttcctttaccgtcatcaacgtaagagatcagcttttggaaaatccgttttgcgacttgctggtcagcagaagacagtgatttcttgcctgctttgttgccagactcaactccggtccaaaccgccgctgtatattgaggggtgtatccgacaaaccatgagtctgggactccgcccggagcaatgttatatttttgaatatcacctttagtaaagttggtcgtacccgttttaccggcaacttccacgttcggtacttgagctaatctgcctgttcctgactgcacgactgttttgagcatatcggtaatcatgaatgccgtgtaatcgctcatagcacttttcggtttcggtgttaaatcaagcttagtgccgtcattaaattcaatcgatgtgaccgcatgcggttcattgtacgttccgttatttccgaaagcgctgtaggcgcccgccattgtcatagtagatacaccgcggttatcctcaccaaatcctccgatcgaataagattcggttacactctctttgtttaatcctagtcctaagtcatttgcgaagtcgacggcattatctttaccggctgcttgatatgctttcagagccggaatattacgagagtctgagagggcctctcgcattgatatcatatttctgtatttgttgtcgtagtcgtgaataggagtgccgtcagagtacgtataagctgagtcgtcaatctgctcgtaagtcgaccattttttattttcaatgaccggcccgtaatcaagaatcggttttatcgttgaaccgggctgggttttaccttgtgttgcataattgaatcccccggtagttctattccgtcccggtccgatggcgcggatttctccgtttgtcgtatcaaggagcgtgacgcctccctgcatgccttccgaaaagccaaccgtgtctccgttcatcaattgatcaagataatcttgtgccttcgtatcaagagtcgtgtaaattttcagtccgtcagttgaaatattgacgtctttcttttcttttgtctcgatttctttcataacttcttcgacaaaagcgctgtatttatttgtgtcctttttatcgtattccttttggctgacgacgccttcatctttcatggacactttctttgctttctggtattcagaatttgaaatgaatccttgtttttccattaagctgagaacaatgttccggcgtttttcggaagccttcggatttttaaccgggttatatccggtcgggctttgcggcattccggcaagcgtcgccgcctgttcaaccgtaagcttgctcaagtcttttacgccgaagaattcttcagccgctttaccgacgccataggcacgcggtgagaaataaattctgtttaaatacatttctaagatttcatctttagaataatggcgctccagctgcagtgaaagccacacttcctgtgctttccgtttaatcgttttctgatgggtcaaaagcgagtttttcacaacctgctgggtgattgtgcttcctccctctgaaccgaatccatccgtaaagttggcgaccaaggcgcctccgatccggatcgggtctataccgtggtgtttataaaaacgggcgtcttcagttgcgataaatgcttctttcacaacatcgggaatatccttaatcgggacgtaggttcgtttttcaccgcccacttccgcgatttctttgccgtttttatcgtaaatcgttgaagagtaaggcgttttcagcttggcttcgtccaaagacggcgcgccggaaaccaaaacggcaaatgccgccgctccgccgactatgccaaggacaaacagaataaccaaggacagcacaatctttttgaataaaccgcctttacgctgtttcttgccttttttcggtgaagagggcttagtgcttttcgtctgccttgccttacggcgttcttcacggctcgtaaattgatctgacataacatctcaacctttcgtttatcaacctttcgctcagtctactgttcctgcgaaaaataaagctgttcaataatactaatataatcaattctcggtgagtatccaagggaaatcggaaaggaagcatcttctaattcgtctttgcgaattgattttctgccattgttctcctttctctcccaaaagacaaacagcttgtcggcttcgaggaaataaacctttccgaaagcggatataataacaaaacaaatgccgtcttgtttgaccacctgcttcatatgttcaatctgatgatcatgaaaattctgcaggggaaatgccgttttgttttttgtttcttttgcctcaaaatcaatgtagcgtcctttataaatgccgttgtagtcggttgtggaagactgtttaaaataagcttccttaatgactgcggcgcttcttttcggatagtggacgtttacaatctggacgggtgtcggctttttgtgaatgacagcaatttggttagccagataatacttattcgtttcattcagatcgtcttcgagggtcatgccgcgattactgtatgaatgagaccgtttctggctgttttgggatgaaaccgttttgttcggctgaaaagtttttccattcgggtaccgaatcactttttccatcctccttatcaaactaatagtgacggaagtgaatgaacgtgcataaacgacagaccgtaaccgccattcttcgcctgatcgaaaaagagacgaaaataaaaaatgctgataatatttcccggacgaatgcctataaagcatattatgaccgccatcctgagatcaagtggccgcttttggcatcctttgtgtcccgcaatgcgggctggtcgatgactgatttaagaggcgtcctttatcaggagggccttgacagcagtcagaaaaactggtttttcctttcgtatgaaagggcgaattggctgattttttctgatgcctatcctcagcttctggtctaccagtggtcaaaacaaatcggcgaacctctattccgtcatctttcttatttccgcgtctcggcttttatgcaggaagaatggttccgcttttggcgtgacggagatacggaacggctcatgtatgctcttattataaatgaacaaaacactatccaagcacctattatacaaaatccttcgtttaaaaagaatgtttttggcacgattcctttttatttaagtgattggtttcactttaatacggtgatattcccttcatttgacggacatttatacggaatttccgtcaaacggttttcgaaaaccgaagaaagaattacgctcggaaaacagctggcccgccttctgttcagccctgaccttcacgcttctttttaccgttttcttgataccgttcctcataccggttcacgctttgatatggagaaaatgatcggcatcaaaaaaagaacatcaccgatgctgaggacaacctatcccattgttgcccacccattagacggcgaaagggaggattggtttcaaaaaaggttaagaaaaggggctttcttacaggagaaaatgccgaaacagcttgaactgacggactggtacttccagaaaagacgggagctccatgcgctcttcgcagttaaagagtggctgaagaaatgaaaaagcccgaaaccgttcgctggggtttcgggctgctgatgtgttacgtggaagggcggtttgggccgcctaattttttatcaagcgtatcagtcgtttttgcttcggttttttgctgtttacctgcatttttcggtctcgttttcatacggcacctcctcaactgtatcgtttgcattaacgtgccggttcatacaaagtttgcggcacttttttgtcgaaaggcacgccttttaggataatctctgtttgtttgccgaactgcttctagttttgtcatgtgcagaggagagcggtatgaaaacgagaattatattctaaagagacgcaagtgataaaagggaggaacatgaatgtctgtttacacgagcaaggctgatattctccgtctgctttctgatatcgaaatccggatttctgctgctgaaaagacgcttacccaagcagtcagatcctgtcaggcggaagctgaagaaatcaggcaggagaaactttcccgccttgaggaagaggcgcgggagcttcatgtttgtattgatgacctgtttttggctgaccggcgtaaaaaggatttgccgagagcctgccggatcagctgattttatgcaaaaactttggtaccatatgtactgaggtgagtccgtttgcagacacagtcgttattggagctgacagaacaaatgatagaggcggttctggaagccgaaaaaaggtatcaggatggaaaagagtcaggccgttcatatgatttttttgagattattaaacccgatgttggaaaaagagaccggctttgcgcgctttggacagaagcagcgcttgcgtttattcaggaaaaccgtccgaaatacgttcatcacgcacaaattcaggccgttacagaaaatttcggagagctgatgctccaatcatatgttcatcatattcataaaaaaagatacagggatttaactgaatctgttttatatacgcttcgtatattaagggatgaaattgaaaaagaaggcagctgaaaacggctgccttcttttatataaaggggtcgggtatgttattcatacgccgggttttctgctccacttgcttcgagaaccttcatactgtttcgaaattcggttgcggtgagatggccttgaatatagaggaattttgcaaagtccatcagtttatctgcacaatctgtttcatattttttcacttcagcaaaacgctttcttaagtatgatacgttcataatggtgcatcccctctcatgtatgttgagattatggtaacataacgattcgacttttttctgtttttaaaaaattaagactttcgacagcatttgacaaagatcagaatctccgaaagcacataaccaaggcggaattcatacatatatagcagaaacttagtgagagacaagggggaatgtcatatgcaatggagagcgcagccatatcaaaatatgtaccagcagccggcgggatatttctacccgcagcagatacagccattacagcagccgagtccgcagcagatacagtcattacagccgccgtatccgcagcagatacagccattgcagccgccgccatatcaacagcaagggcagtacccgcagcaattttatccgaatcaggaatacggtcatatgcagcagccgtttgctccccctcctcctcaggcaggcatgcccgggggccagccggggtttgtgaatccttaccccgttcccagaccgaatcagcagcagtcttcccaattctcaggcatactctcccagtttaaaaaaacgaacggacaatttgactttaataaaatgatggatacaacggggcagatggtaagcgccgtaaatcaggtcggatcgctggtgaaaggcctcaccagtatcttcaaataaaaagcatgaatgatatccatcattcatgcttattttttagggaaaaagagggtaagcgtctgttcattccaggatgtttccatatcttcttcactcaccttatacgggaggacaacggttcttgtcatgcttgaagacacatgggatgaatgagcctgtttatgatcgtagcggattgtaacgtgaaggtagcaccctttcgtttccaccagcatatccccgtcacggaacgtctcggggacgccgatatcaaccgcgaggcccgtcggctcttctctgacgtcaatcgtcacttgcgcttcagtaaaagccgaattgacaaggtgctgaaaaccctgcatcaattctgcgaaaggacctgagtgaaaaaattggtccatcgcatggctgatgatgtcctcatttctttgcggatcaagtttatcgttttgtgattgatccatatgaccaccgcctttttacaaacagactatgcgatgttaagccgtatggttaagaattgaaggaaaaaagaaagtatggttaaatagtggagaataaactggtaacggattcacatttaggaaggggagcacaacacattgctgaaaaaattattcggattgggagacagccggaaaaagccggccgaggaagtgattttttctccggctgacggaatggtgatggatttggcttcagtgccggatcccgtattttcacaaaaaatgatgggggacgggatcgccgtcgagcctgcaaacggagacattgtttcaccggttgagggagaagtgattcagctgttccatacaaaacatgctgtcggcatccgcaccctttccggagcggaacttttgatacatgtcggtttggataccgtcaatatgaacggtgaaggctttgaagcgcatgtaaaagaaggagacaaagtgaaaacaggcgatctgcttttaacgtgccggctggatttaataaaagaaaaagcaagcagcaccgtcatccctatggtgattatgaatggcgatgccgcagaacctttgcaatttgcaggcgcaaatgaagcgaaaaaaggacaaacagagctttttacgataaaaatgaagtaggcaggggctgattccctgctttttttcttgtgcaggattttcatctagccaggcaaacaaatattcggtaaactgtacctcataaagaggtgtgaacgatgaagaaaaaatcactgagcgaactgatacaggaattaaaaaatcatgaaaatattgtgcattggcatgaagaggaaccgcgggaggcgaaaaccatgccgatgccggagcaagtagatccgaacattcgggcggctctcgaaaagagggggatcgagcggctctttacacatcaatactccgcttttcagacggttcaaaacggagaaagcattgtggctgtcacaccgacggcctccggaaaaacactgtgctataatcttccggttcttcagtctatcgcggaagatgcctcaagccgcgcgctttatttatttccgacaaaggcgctcgcgcaggatcaaaaaagcgagctgaatgaaatcatagacgagacgggcatggacattaaaagcttcacctatgacggagatacgtctccggccatcaggcagaaagtcagaaaggccgggcatattgtgattacaaatcccgatatgcttcattcagccattcttccccaccatacaaaatgggtgagtctgtttgaaaacctgaaatatatcgtcattgatgaattacatacgtaccggggcgtattcggcagccatgtggcgaacgtcatccgccgtttaatgagaatctgcgctttttacggaagcaagccgtcatttatctgcacatccgccacaatcgccaatccgagggagttggcggagcagctgacgggaaaatctgtgcgcctgattgacgacaacggagccccggccggaagaaagcactttgctttttacaatcctccgattgtaaataaaccgctgcatattcgaaaaagcgccaccgtggaagtgaacgaacttgccaaaacttttttgaaaaataagatccagacgattgtttttgcaaggagccgtgtgcgggttgaaattattttaagccacattcaggagatcgtaaaaaaagaaatcggcgcgaagtctgtcagaggctatcgcggcggatatcttccgaaagaaagaagagaaatagagcgggggttaagagacggcagcattctcggcgttgtcagcacaaacgcgctggagctcggcgttgatatcggccagcttcaggtctgcgtgatgacggggtacccgggcagtgtcgcgagcgcatggcagcaggcgggccgggccgggcggcggcagggagaggcgcttatcgtgatggtggcgaactctgatccgattgaccaatatattgtgcgccatcctgattatttctttaaacgctcgcctgaatctgcaaggattaatcctgataatctcattatattggtcgatcacctgaaatgcgctgcgtatgagctgcctttcagagccgatgaaacattcggagaaaatgatgcaagagacattcttgagtatttagaggaagaaggggtgcttcacgaaaaccgcaaacgctatcactgggcgagcgaatcttttcccgcctccaacatcagtctccgttcggcgtcacaggaaaacgtggtcatcgttgaccggtcagagacggctgatgtaaaaatcatcggagaaatggaccgcttcagcgcgatgacgcttcttcatgatgaagcgatttatcttcatgaaggggtgcagtaccaggttgaaaagcttgattgggatcataaaaaagcgtacgtgcgaaaggtcgatgtcgaatattatacagatgccaatttagcggtgcagctgaaagtgctggacattgacagaacggacagcagaaagaaaatggccttacatttcggcgatgtaaccgtgaacgcacttccgacaatatttaaaaaaattaaaatgacgacatttgaaaatataggatcagggccgattcatcttccagaagaagaactgcataccagtgctgcgtggcttgaattgaaagagacggattcggagatcggcgaaaaaacgcttgaacagctgcttttaggcattgcccacgtcctgcagcatatcgtgcctgtatacgtcatgtgcgaccgaaatgacgtgcatgtcgtgccgcaaatcaaagccgcacataccggacttccgacaatctttctgtatgatcattatccgggcggaatcggacttgctgatgaagtatataagcgatttgatgaaatcaatgaaggggctgagcgcctgatcagacaatgtccatgtcaagacggatgtccttcctgcatcggttccgaaatagaaggaatagatgcaaagaaagcgatactccggctcttgaattacgtgtaaaagaaaagggggacgaaagatgtccttgaaaaataaattaaagcggatgaaaaaccacctgaatgtgccggaagctgaaaaaaagccggcagcttcacaactttcggtcccggatattcaagtcccatttagagaagaatgggaggcattcggagtgaagcctttcttttttgaggatgaatactgtcttatccgcgaaaccgtctatccgctttcgcaccgtcacggacggtacagcttcagtgaacttgatgacgtcatggcattatggaataaaggcggtttgacacatactttatcagcagaaggatacgaaaaaagccagctgttcttctttgatactgaaacgaccggcctcggcggcggggccggcaatatgatctttttgctcggtcatgcaagagtgtatgaagaccgtgtcgcggttaaacagcatctgcttcctaaaccgggaaacgagacggctctttacaaaagctttttaagtgaggttgacattacgtcccttgttacgtataacggaaaagcctttgactggccgcaggtaaaaactaggcatacattgctgcgggacaggcttccgaaacttcctgacttcggtcactttgatcttctgcacggggcgagacggctttggaaacataaattagagcgtgtatcgctttcggcggttgaaaatgaagagcttgcttttaaaagggacgaagacacccctggttatttggcgccgatgctgtattttcaatttttaaaggcggaggacccggctcttttaaagggagtgctctcacataatgaacaagatgtgctttccctcatcgctctatacatccatatgtcaaaaaagatttttgcatcttctgatcagacgtcagaacgtcaggaagcatacgccatggcgaaatggtttatcgctcataaagaaaccgatcgggctgtttcacagctggaagcgctgcaaggcaaagcctttgaagattcggatcgggccctttttgacttagcaatgctttataaaaaacaaaaccgcaggcaagacgccgtgcccctttgggagaaactgacgggctctgctcttcacatatgcagacaccaatcagcggtagagctggcgatctattttgagcatcacgcaaaagattacaaaaaagctctgcaggtcgcgcagcaggcggcagaagacggggaaatatcggaaaaagaagccgagaagctccatgtgagaattgcccggctcaagaggaaatattcctcttgaaatattgcccgggaaagcgcaaaagccgagctgtttcgccaaaaatatttttttctgaatccgcatcgattttgttgtagaatggtgccgcatcttgtaaaatagcgttagttatttataggggagagttggtatgtataaaggtgttttttacttgttctttgtcgtggtttttttgattgcgtttgtattttcgaattttaaagacagtttgctgacgcacttttaaattgggtgattgaattagaacatgtaccctcttttcttcataacctaacagtgtaataaaagttaatggagaggggatttagcatgtttcatcatcattgttgcagaccaaacgtgatgccgccgattgtccatccgactcattgctgtgaacaccattgcttttctaacacggttgtgccgcatattcatccgcaacatacaactaacgtaaatcaccacaactttgagcacgttcattactatccgcacactttttcaaatgttgacccgacaactcaccagcattttcagtgcggaagcccttgctgcgatcattagtattgaacgcttaagcaagatcggttaggatatcagcaaatcaaaatggggcccgatggggagccccattttttaagcaggtgatcaattgaaagtattagccgtaacaggatacaagccgtttgaactcgggatttttaaacaggatgaccgggcgcttgtttatataaaaaaggcgatagaaacgagactcagaagctttattgacgaaggcttggaatggattctcatatccggacagctggggactgagctttgggcggcagaaacggcgtacgatctcagagaagagtatccggaattaaaggttgccgttatcacacctttctacggccaggaggaaaagtggaaggatccgaataaagaaatgtatgaagcggtgcttgctcaggcagattatgaggagagcctgacgcatcggccgtacgaaagtccgctccaattccggcagaaaaacgcgttctttattgaaaagtcagatgcgcttttgcttttatatgaccctgaaatggaaggatcgccgaaatatatgctgcagcaggcagaaaaacgccgtgaaacagacggatatccgatttattcgattacgatggatgatctccgtgccgccgttgaagaagaagatttctttacataacacgtcagagaatatttgacaacgggacgtgtttctgaataaaatataacatgatgattcacgatatgaggtgaaaaagatgcttgctgataaagtaaagctttctgcgaaagacattttggaaaaagaatttaaaacaggcgttagaggttacagacaagaagacgttgacaaatttttagatatgattattaaggattatgaaacctttcatcaagaaattgaagaactgcagcaagaaaatctgcagctgaaaaaacagcttgaagaagcaagcaaaaaacagccggtgcagtccaatacaaccaactttgacattctgaaaaggctgtccaaccttgagaagcatgtattcggcagcaaactttatgacgaataaggcagaagcacttgtcaaatgagacaagttgctttataatgaacaagtgttcttaacgttcgggtaatcgctgcagatctttgaatctgtagaggaaagtccatgctcgcacggtgctgagatgcccgtagtgttcgtgcctagcgaagaaataagctagggcagccttgataggctgacggcaggaaaaaagcctacgtctccggatatggctgagtatccttgaaagtgccacagtgacgaagtctcatcagaaatggtgagagtggaacgcggtaaacccctcgagcgagaaacccaaattttggtaggggaaccttcttgaaggaattgaacagatagaaggacagaatgctttctgtagatagatgattgccgcctgagtacgaggtgatgagccgattgcagtacgacggaacaaaacatggcttacagaacgttaaacattattgatatgacaaattagagctctcctttaaaggggagcttttatcttgaatgaaacgaaagcttaaaaagagacagggtgatacgatgaagaagtacacactaatagcgacggcgccgatgggaatcgaagcgatcgtcgccaaagaagtgcgtgatttaggttatgaatgcaaagtagacaacggaaaagtcatttttgaaggagatgcgcttgcgatctgccgggctaacttatggctgcggacggctgaccgcattaaagtacaggtcgccgagtttcaggcgaaaacgtttgatgagctgtttgaaaaaacaaaagcgattgactggcgcgcgtacattccggaaaacgccaagttccccgttatcggaaagtccgtgaaatcagtgcttgccagtgtgcctgactgccagcggatcgtcaaaaaggcgatagcggaaaagctgaaacttcaatcaggaaaacaaaatgaatggattgaagaaacgggacccgagtacaaggtggagatttcccttttaaaagataaagccgtacttacactggattcatcaggaacaggccttcataaaagaggatacagggttgatcagggaggagctccgattaaagagacgctcgctgccgcgttaattcagttaaccaactggacgcctgaccgtccgttcgttgatccgttctgcggttccggcacgatcgccatcgaagccgctttaatcgggcaaaacattgctcccggttttaaccgtgattttgtttcagaggactgggaatggatcggaaaagaactgtgggacaaggcgcgtcttgaagtggaagaaaaggcgaactatgatcagccgctgcagatctttgccagtgacgtggatcaccggatggtaaacatcgccaaagaaaacgcagaagaagcgggacttggtgacctgatcgaatgcaaacaaatgcgggtgcaggattttacgacgaaactcgaatacggcgtaatcgtcggaaaccctccgtacggcgaacggctcggcgaaaaaagggaagtcgagcagatgtataaagaaatgggccgggcatttgaatctcttgatacatggtctgtctacatgttaacgtcaaatgaacaatttgaagaggtctacggaagaaaagcaaccaaaaaacggaagctctttaacggttttatcaaaacggattattatcagtactgggctaaagtgcggccgcagcggaaaaagccgcaacaaagagaagacgcctgaaacagcgtcttctctggcatctttacgttttattctgccattaccagcggtgcgcttttgcgttgctccgtaaaataatgttggtctgggacatttcggtgtggccgttcacttgcgatttagagcgtttcggccgcgtccaattgtgatgaaacaattcagaatgctgatctaatcgatctttataactcatgtaaccatcactcccggatagaataattttgtgaagatggatattcaatcgaatatctgttgtagtttgtgcaggtcaggtgcggatcattcagaatggcatgtatagaaagtgaagcatcggcatagaatgatgattatttctatttgagaggtgatcttattttatgctgaacagcgagcacttcagtaaaatacaaaaggcgttagacgcaactgctttccggctggaggaagccggagcggagttcggtccttccgccatgacacacgcacaggaagaacttgaaaatgcggtaaaacatacacattcaacagaccatccgttcctatgtacacatatcattaaccggaaatgataatggcaaaaacttggcgaggccaagtttttttgttgtattgaaaagggttaaatgatattatagatggtctgaatgccgaatagttaggggttggagttgggtgacaacatcacgtttgccttttgctttaacaaaagaaaagaatttttacgaagaattgaacaattggattggtgacgtgttttacgatatccttcccgagaaaggctttgaccttcgggatgagcaggtatttatggcgtttcagcttgaacgggcatttaaagagaaaaaggtcatgttcgctgaggcaggagtcggtacggggaaaacgctggtgtatctgctgtttgccatcagctatgccagatatacgggtaaaccggccattatcgcatgcgccgatgaaacgttaattgaacagcttgtcaaaaaagaaggcgacatttccaagctgacagaacatttggatctgcagattgatacacggctgtccaaatcccatgagcagtatctgtgtctgaaaaagcttgagaaaacgatgcagcgttctgatgatgaaaagtggctggatctttatgagtcgctgccttcattcgtacacgaatcacaagcgatgcagcgcttttatccgtacggcgaccgcaaacagtacgctgatttgacgaatgaagagtgggcaggcgtcagttatgattccttccaagattgtttaacatgtgatatgagacatagatgcggtttaacactttcaagagatcattacagaaaatcaacggatctgattgtttgctcccatgatttctacatggaacatgtatggacggaagaatcacgcaaaagggaaggacagctgccgcttttgccggatcacagcgctgtcgtgtttgatgaaggacacctgctggaattcgccgcgcaaaaagcgttaacctatcgcgtgaagcagtcgacgcttgagctgtttttagagcgtctgcttcaaaatgacatcagagaggaattcgccgaactgattgaagatgcccttgccgcaaacgatgagtttttctatgtgctgtcagaggaatcgaaggaaatcgccggctctcaccgattggacatccaaaacgatcagcgtgttaagcgtgcggctgacgaattgtgccgtctgctcgataaaatcggcgaggcgctcgtatttgaatcggaaatgtatacgatcgataagtacgagctgtcagtcgtagaagaatacgtcgaacaaatggcatattcgctgtcgctgtatcaaaaggatgccatcagctggcttgaaacgcgggatacagactcaacgtttgtcgttatgccgagaacagtagccgaagttttgggagaaaaggtcttttctaaaaagatcccttatattttctcatcggccactctttctgagggcggttcatttgattatatcgctgacagcctcggaatccgtgatcctttatcattcaccgttgaatctccgtacgattacgaggagcaaatgtctgttgcgctttacggtgacatgacgtctgagcagaaaacagccgaaacgattgaaaccattaagaagaatgaaggacgcaccctcgttctcttcccttcctttgaagacatgaaggaatttaaagaacaggctgccgcgtgggagctgccgtatccgatatactacgaaggtgatgaagagatcagcagtctggtcgaaaaattccagcgggatgaagaatccgtgctttgttccgtccacttatgggaaggtcttgacattcccggtgactcgctccggaatgtgaccatttgggcattaccgtatccgcctcatgatcccgtgtttaccgcaaagcggaacggagcgaaaaaagatccgtttgaggaagttgatctgccgtacatgctcttgagagtccggcagggaatcggccgcctcatccgttctaatcaggacagcggaaccatatccatttatgcgggcggagaaagtgaacgggtcttggccgaagtcaaaaagatcttgcctgttacaccgaaaatcgtataaaaacaaaagctgcaggattcttatcctgcggcttttttaaatccgggaagttgactttatcacggcattccattagcctgtaattgatagtgaaaagggaggggaatggatatggatttacatacatatgaaaaagagttttttaatctgttaaaaagagtatcccactatgtcgaagccattgcacttatgcactgggacttaagaacgggagccccgaaaaaaggctctgatgaccgggcggaaagcatcggacagctgtcggctgacgtttttcaaatccagacatccgaccggatgaaagagctgatcgacatccttctcgcgcatgcagaagagctctctgaagatacagtgaaagcggcggaacttgcgaaaaaagattatgatcataataaaaaaattcctgaagatgagtataaagaatatgtcattttaacatcgaaagcggaaacggcttgggaggatgcaaaggctgactctgatttttctatgtttgctccgtaccttgagaagctgattgattttaataagcggtttatttcgtattggggctatgaagatcatccatacaatgcattgctcgatattttcgaaccgggtgttacggtaaaggtgctggatcagctgttttctgaattgaaggaagcgatcattccgcttatcaaaaaagtgacggaatccggcaataaaccggacacttcctttataacgaaaacgtttccgaaagaacagcaaagagacctctccttgtatttcttaaaagagttcgggtatgattttgacggcggccgcctggacgagacggtgcatccgtttgcgacgacaatcaaccggggcgatgtacgggtgacgaccagatatgacgaaaacgatttccgcacggcgattttcggaacgattcatgaatgcgggcatgcgatctacgagcagaatattgacgaagcgctgagcggaacgaacttatctgacggtgcatccatgggaattcatgaatcccaatcgttattttatgaaaactttatcgccagaaatcaacatttctggaccgcctattatgaaaaaatggttgaggcttcacctgatcaatttcaagatgtgaaaagagaggactttgtacgcgccgtaaatgaggcgaaaccaacctttatccgaattgaagccgatgagctgacatatccgcttcacattattatccgttatgaaattgaaaaagcgattttcagcaatgaagtgacagtggaagaactgcctgcattgtggaatcaaaaatatcatgattatttaggcattacgccgccatctgacgcaaaaggcattttgcaggacgtacattgggcgggcggcgatttcggctatttcccttcctatgcgctcggatatatgtatgcggcacagctgaagcataccatgcttgacgatctgcctgaatttgaccaattaatagaacggggcgattttgagccgattaaacaatggctgacagaaaaggttcatcagcacggaagacgcaaaatgccgcttgacatcataaaagatgcaacgggagaagagctgaacgttcaatatctcattgagtatctcgtcggcaaatattcaaatttatatttataaacgaaacgcccggcatacaccgggcgtttttctaaaaattctaaaaacacgaataatcgaaaccgattctttgtaaaagttcggaaatattcaaatttcactatgcaaaagaagtgtatcttgttataatttgattaatatcatacgaacactcatataatcgcgtggatatggcacgcaagtttctaccggtcaccgtaaatgtccgactatgagtgagcaatgggacggctttattcggccgttgcgtgtagatcattcggcattgcttgctctttttttggagagcgggcaatgcttttttttattttttataagcgggggtaatcattgtggaagcattaaaacgaaaaatagcaggagacggaatcgttctttctgatcaagtgctgaaagtggattcttttttaaaccatcaaattgatccggttctcatgcagcagatcggccgggaatttgcgcgccgttttgaaaaagacgagataaccaaaatcgttacaattgaatcttcgggtatcgcccctgcggtgatggctggccttgaactcggcgttcccgtcatctttgcgagaaaaaggaagtctctcacattaacggatgatctgctgacggcatccgtctattctttcacgaaaaaaacagaaagtcagattgcaatctccggaaatcatctgtcgaaagttgaccgcgtgttaatcattgacgactttttagcgaacggacaggcggcagaaggacttttatccatcgtaaaacaagcaggcgcagcggtttgcgggatcggaatcgtcattgaaaagtcatttcagccgggaagagatgagctggtgaaaaaaggatgccggatcgaatcactggcgagaattcaatcgcttgaagatggaaaagtgacatttgtacaggaggtccgttcatgaaaaacggctatgccaaaacactttccctcggtatccagcacgtgcttgccatgtatgccggcgccgtcgttgttcctttaattgtaggagcggcattgggactgaacgcagaacagctgacatatctcgtatcaattgacatttttatgtgcggggcggctacgctgcttcaagtatggaggaataaatttttcggcatcggcttgcctgttgtgctcggctgtacgttcaccgcggtagcgccgattatttcgatcggtaaggaatacgggatttcagccatttacggaagcattttggcatcgggtctgcttgtcattctgctgtcgtttttctttggtaagctcgtatcctttttcccgcctgtcgtaaccggatctgtcgtgacgattatcgggatgaccttgatgccggtcgcgatgaatcatattgccggcggggaaggcagcgaggatttcggtgatccggctaaccttgccctcggatttacggtgctcgtcatcatcgtgctgctttatcggtttacaaaaggatttttgaaatccatttcgattttaatcggcattgtcatcgggacggccatcgcatattttatgggaaaagtgcaatttgacaatgtggcgaatgctgatgccattcaaatgattaaaccgttttacttcgggacgccgacatttcatgcggcaccgattattacgatgtccatcgttgccattgtcagccttgttgagtcaaccggcgtctatttcgctctcggtgacctgacaaaccggcgcctgtctgaacgtgatttagcaaaaggctaccgtgcggaaggcctggcggtattcatcagcggcatttttaatgcttttccgtacacggcttattcccaaaacgtcggcctcgtgcaactgacaggaattaagaaaaacgcggttatcggtgtcacgggcgcacttttaatgctcttcggcctttttccgaaaatcgcagccttcacgaccatcatcccgtcttcggtactgggaggcgcgatggtggccatgttcggcatggtcatttcctacggcattaaaatgctcagtcaaattgactttaaaaagcaggaaaaccttctgatcgtcgcgtgttcggtcggattgggactcggtgtaaccgtcgttcccgatatgtttaagcacctgccgtcttacttaaatctgctgaccacaaacggaatcgtcgccggaagctttaccgccgtccttttgaatattatttataatatgattcctaaaacgaaaaaaaaccttgatgtgacaagggttcaagagggttagttatccgttttctttaaaataacatcttatttatccagatcgaggatgcttccgaaagttgctgaactttttgcgaggcatctctttttttattagtttcattgtttgaaaagaaacaaattgagtgatgaggcatccgccttatttcgccgaaaaaccgtcccggactatatgtacgtgaacgagtatcttgtgcacgaattcttacaaaagagagtaaaagaagggaaagccccttcttttaattaatcgatccttcaaaagttgcgcgatagaacccttcgattatctctactttcttaaggtaatatgtaacaccattcttaacagttgtatttggaatatcccatctatgaaggtaatccgttgtaaaagaatctttggtcgcatgtgtcgaaatttttgtttgagttgagtcgatatttgtattaccagggctagatgcaaaagcaggggcagcggaaacgagtaaagcgagagacaaggcagaaccagttaaaactttttttaatttcatttttaacactcctttgttttttttgatacacttgtattattacatacaatacaaaaataaccaagggttttttgttaatattttgtgagcgtgaatttagttaggagcgatcctttcattcactgttgcggcttatgtcaggatattgataagtatatagagaaaaagagttgaatattgctggcctctggtgaactttagatatttcaatgcttttccaacggggaagatgtgatagtaatttaatcaattgtacaaaagtaaaaactttatttaaaatgttataaatacgaaatttaatataggaggttatctgatggcagaaaagaaaaaagctttaatcattgtggatgtacaaaaagcctttgatgataaaaagtggggagaacgaaataacgtaaaggcggaggaaaatatcagcaaaatactgaaattatggagagaaaaaggatggacagtcatatacatacaacatacttctgataaacctggttctttattttatccaaaaaatgagggggttgctataaaggaaatcgttaaacctatggaaaaagaagtcattataaccaaaaaagtaaacagcagctttattgggactaatctagaagagcttttaaaagcaaatgatataacaactgtcgtaatcactggcttgactacgccgcactgtgtttcaacaaccacaaggatgagcggtaatttaggatttgatacatacctgatttcagatgcaacagcagccttcggaatgagagatcaaaatgatacatattatgatgcagagactattcacaatatatctctggccacgttgcatgatgaatttgccacaatattaacgactgatcaattaatcaatcattttataaaaacaaactgactaacattatggctaagggcggcggtggatataggcggctgaaaagcatattcaggcgcatacaaggacctctcgaaaaatacggggattaccgactcttttcatcgtcgcaatatcgattgaaaaaggcatctgcttcagatgctttttttgtttcttgtaaaccggttttgatcggcggttaacggtctgattcggcgaataacaaaaggctttactaatcagcgaattattcaagattttttggtttgtgctgggtctggtgacttttgatttcctcgaatatattggcttgatcatctttttgaggctgaggctctttgttaagacattttggatcgatcacttttttaaggtctttgatggttaaaggcttacagtcatcttttaattcgtagcctaattgtccgttagcttctaaagtggcatatttaattgtatttatatttgaaatgccaagaagccttaaacgcatttcgagttgatctgctgtcagtctcagcttctttaagttttctatattgagttggccgtcttctataacgaatttagattttccggttaaaaaagattcaatccagtttacttttacttgaaaccactccattaaaatcaaagagctaaaaaggatagacgcagcgattaatgttttcaataaactggtttctaaaatggggtgaacgataatcgtaccgattgaaatcatcaccattgtctgtgcaatggtcatttgtgcaatggattttctccctgaaattctcagtaaaatcattccgaatgcaattataattaattcttcccaagcaaatctcatgttatcaccctggattgtgttttatcaaaaataaaagagcaagtaagaggttttatggggtacttgctcacgaagaattattgcccttacatttaattttattcattttaggtgtttttctaactggagaaactattttgcgagggtgaattcatttcggaatctccaatacaagaggcggcggtgaatattggtggctgaaaagcacaccaaggagtataaggagtgcgtaaggcatgaaatagaagaaccttgcccagaaatacgagtgagttgtcaattagtacaattaagtcataggaaaagcggcatggttgggaaggatgcatactgagacactctgctaaaatgcattgaggaacaacggtctgctgctgagacagagcttgaaatacggttgcttgaaatcgccgcacaacgctcttcgttgatcatggtatttaggaggttagtagggaaaacaactatgaaaaaagggatgagagaaaaatctcttatcccttagataatcttaaaaccaaccttggtattcaccagtccatgtgccatcactgttctgcttggcatcttttaaatagtatttaactccagcaaatactgttacattaagaagttctccacgtgtattagcattgatgtatatagtttttaacactgcctgaggagctgcagttttatgactcccgccatctgcagtcgggcttgctgcaaaagcaggagcagcagaaacaagtaaagcaagtgatagagctgaaccggttaaaacttttttaaatttcatttaaaacactccctttttttatttgatacaactgtattatataactgtatgtaaaatttgtccatataaacttatgttaactttttgtgaatataagaaagtattctcccccatgagttttattaactcgtaccatcttattttaagccttcagagtaaggcatcatcatatgacgtcaaaactgttgtatgatactagggaaatcatttttagtcgaaatgaggagttgcatgacatttacggaacgggcggtagccataatcaaacagattcctgaaggaaaagtgatgacgtatggtcaaattgctgatcttgcgggaagtccgaggggagcgaggcaggttgtgaggattcttcactccatgagtaaaaagcatcgtcttccttggcacagggtcatcaatgcaaagggtgaaatcggattgagagacgaagagatgttttctgtacagaagctgtctcttgaagctgagggggtagcggtcacgtcagacggacggatcgatctcaatttatacgtccatgatccgaatatgtaaaaaaacctgccgtatatcggcaggtttttcagttatatgctgcgagccggccagaaaggttttgccggatataaggccattcctcccgaaggattgagtagtaggcagtatctctgaggccgacgtcgacagccggaatgtgtgcgcggcggatcccttcaaattgggctccgatccgcaaaatcgcagtccgtgagcgctgattgcgaacgtcggttttcagtgtcaccctgacagcttgccacacgtcaaacgcatgagtcagcatcagaagtttacattccgtattgacaccggtccgctgcacggcagaggcataccatgtgctgccgatctcacacacttccggagctgcatccgccggccgcgtaaacacttccgcatccataaacctcgtgcttccgacgattcggtctgtttcgagactccgtactgcaaaaggcaatgcaagtcctttttcataattcgaaagcgcgcgctcaatataacgctttgtttcttcgattccgtcaggaacatgggtgtaagcgtaagtcgtcctattttctgaagcagcttcacagagtgcctgagtgtgatcaatcgccagcggctctaactgaacgagtgaccctctaagaatgacaggcttcagcattcttatcacaacctttttttatgaatggatcaagtatagtcgaagggtttcttattcaaaagggccaatttcccattaaaatggcgggtcaatgaaatcctcgattcacacttatgcatacattcaggaaaaaagcggaaacctttatgtaaagaggtgatgggcatggcatatgtgttatcggtcggaacgagcattccggaatatcatgtctcgcaagaaacggcggcagattttgcgagagggatgtttgccgattcatttaaggatattgaccggctgttaaaagcctttcaaaacggcgaaattgaatcaaggcagtttgtccggccgattgaatggtataaaacggcacggggtttttcagagaaaaaccggctgtatacggaagaaaccgtcaagcatagtgcggatgcggcacttgattgtttaacaaacccggattgtttaacaaatccctttccatatgaaaaagtggatgcgatcttttttatttccagcaccgggctttcgacacccagcattgaagcgaaagtgatgaatcagcttccgttttctgcgaaaacaaaacggataccgatctggggtttaggatgcgcgggcggagcggccggcctgtccagggcgtacgaatactgccgcgcgtatcctgaagcatacgtgcttgtcatcgcggctgaactctgcagcttaacgtttcagccgaacgacaagtcaaaaagcaacttaatcggaacttccctgtttgcggacggaattgccgcagtactaatcggaggagaaaaggcgaaccgaaacgaagtcaaacagccgcttcttccgcggatatttgccactcaatcggtgatgatgccggatgcggaagatgtgatgggctgggaattcaccgacagcggttttcaagtcattttttcaagagacattcccaccctggtttcacagtggctgaagaacaatgttgatgaatttttatttgaatatggcgtcagtcctcacgacattaaaacctttcttgcccatcccggcgggaaaaaggtcattgacgcctatttaacgagtctttcaatggacaccggtcagcttgcggcatctcggaaggtgctgcaaaaacacgggaacatgtcttccgcaactatttttcatgtgataaaagaacagttgctccacgggcggcagaaagaaaacgaaaaagggctgatcggcgctctcgggccgggattttcgtctgagcttttgctgttcagctgggaaaagggggcttcttaatgttttggctgtttatcatgttgcttgcggcccagcggattgcggagatgatcgtggcccggcgcaatgagcaaaaggtgaaaaagcaaggcgcagtcgaatacggagaaggacattatccctttctcgtcctgatgcacgtgctcttttttgtctctcttacagctgaggtggcggcgtttcaaaaaacgccttctccaaggtgggccgccattatatgtattattttatttgtacaagggatcaggtattgggcgctattatcattagggcggtattggaatacgaaaatccttgtcgtgccggatgcggagcttgtcagaaaggggccgtacaggtggatgaagcacccgaactacgcggtcgtcatcttagaatttatttttctgccgctgttatacggagcgtattggacactgtttctcttttcgattctcaatgcctgcatgctcaccgtgaggattcgcgccgaagagaaagcgctagaagaaaacaccgcaaaatagagattgaaaatcattctcactcatgataagatgtaaatatgaaaatgattctcattcaaggtggtgccgaaaatgacaatgttatttttatttgcagccgtttgtacatacagtgttttaattggtttcgtattgaaaaaagtttcgaataaatcgatgtcttcttaaacatctgcggtttttcctgccgcgggtgttttttctttatcagctgccgatatcggcggcttttttgcgtttcctgaagaaaagtgagccattcttgtgtaaaatgggggagaggtttttttcagagctttctaaaaatgaaaacgtcatttgatgcgacagacacaaaggggtaaagacacatgacagaagaagaacgccataacagggagattttcagcagaacgggtgccttatacgcacaatttttggatcatcaggataaaaaacgggccgatcagctcgcggccattatgaaaaaagcggctgatgaagaggtttatatcgcgtttaccgggcattattcggccggaaagtcctctttattaaacacattgctcggtgaagacatactgccgacaagcccgattcctacaagcgccaacctcgttgtcatccggcacggtgaagataaagtcgtgcttcatacgacggacggggcttatgcagagatcaaaggaagttacgataaagaacaagtgcagcaattctgtaaagatggtgagcaaattgagacggtggaagtctatgccggctttaaggagtcagagcctcatgcggcctacatcgacacaccgggaattgattcgacggacgaagcgcattttttatctgcggcttcggttctccatcaggctgacgctttattttacgtcgttcattataatcacgttcattcagaagaaaatatgctgtttctcagctccatcaaagaccgtattccaaatttatttctgatcgtcaaccaaattgacagacatgatgaaactgaaacgaagtttgaagagtaccgcgggcaggtggaagacatgcttgaaaacgcgggaataccgaaagaatcgcttttctttacgtctgtcactgagcctgaccatcctttaaacggcatggaacagctgaaaaaacatctgcagaagctgaaacagcaggcaaaaacaaatttatggtccttaacggagagaaaagttgcaaacttagtcaaagagcatacagagatgctcgtaaaagatgataaaaacggcagcggagagcagtttgacaaacaagaagcacttgtccgttctgttgaaggtgagcttaaaaaagccgttcaacaggctgaaacagcagagaaagacatcagaaaagacgtgcagaacatattgcaaaacgctaatctgacaccctttgagatgagggagcttgcatctgcttatattgaatcacagcagccctcatttaaaaccggattattcttttcaaaagcgaaaacggctcaggagaaagaaagaaggcatgctgaattttttgccgatattaaaaaaagaacggaaggggaagcggattggcatattatcgacacatttacgaaagcggctaagcggtatgaagcggattcggacgaactgatcaggaaaatccaggcgtaccgcacaccgctttctgatgatatcaccgctcaggcccttaagcagggagcggccttttcatctgaatacgtattaacttatacgaaagacctcgctgaaatgatcagaagggaagccaaaagacagacagcggaactcattgaggagctgaccgcttatgttcagacaaaaaacggaccgctcattgagaacttgaaaaaccggctcgaaaaagaaaagaaaataagggatgagctcgcgcaatcggcaaaagaagaacgcaatgccttggaaaaagcagcccgagtccgcgctttgtgggaagaagaattgacctgtgatacggaaaacggcgactggtatacgcgaaaaaaacgccttgcaaaagcgcccgtccaaaaagagaaaccaaaagaggctgtacagcatgaagtaagcaagcccgaaaaaaatgcgatgaaggaactttctataaaagagcagactgatcggttctatgaacttgccgggattcttgagtcctcgagcatattaggaaaacaggcagaagcctttcgaagcaggattgagcggcttgaaaaccgccagtttaccttggcgttattcggcggattcagttccggtaaatcatcatttgcaaatgcgcttgtcggtgaatacgtgctcccatcatcaccgacgcccacaacggctacgatcaacaaaataacgaaaccgcaagacggcaaaccgcataaatctgcggagatcatttttaaaacggaggaggagctggacgctgaaatgcttcagctgactgagctgaaagatgctgatgtaaaagggcgttcactgaaagagagatggaattatgccattaaaaagggaaaagttccggatgaacttatcccggtgattcaaacgatgctgcaggcgtttgatacgtacgaagaacagatccgtcaaaggctgacactgacggtgccggttgaagatttaaaaccgtacgcagccgaagaaaaaacggcctgctgcgtaaaagaagtcaccgtgtattatgattcgcctctcacgcaaaaaggcatcaccattgttgatacgccgggagcaagcagtataaacaagcgccatacggaacttgcctttcaatatataaaagatgctgacgcgttcttttatatgacgtactatcagcattctttttcaaaaggagacaggtcttttctgaagaaactcggcctcgtcaaagaatcattcggcatggataaaatgttttttgtcattaacgccgccgatctggccaaaaccgaaagcgagctggaaaccgtcaaagactatgtccgctcagaactctcaaaagagggaattaaccggccgaaattatatcatgtctcaagtaaagaagagcttgcgggtaaaaaagaagctttttataacaggttctctgatgtaagaaccgggcttgagcactttattgaggaagatgtaatgagggccagctgcgcccagctgaaaacagaggcggacaaattgtgcgatatggtggaacagcttcacgtatctcttcaccagtcggcagaagaaaaagagaaaaagaaacagcgtctggagtcttcctatgaaaaagctctcgctgacatttcaaagcgccgtacgtctgaggtcatcattcgaaaagtgatgaaagatacggaagaacagctctatcacattaaacatcgcctgacgttttatgcgaatgatatgctgaaaaccgccttccatccgggccttcaaaacggcgattggaaacacaatatatcagcggcgctgaatgaagcgctcaaggaattccgttttgaatatattcaagagctgaaaacgctcgatatccggatgaccggttttattgagcgccatatgactgaggaatggatggaaaactgtcagaagaagcttatggaagacggagatttctccatttatgtcagcggtgaaaacgaatttgccgttcagctgaaagaggtcgctccagtcattgacgtctcggcattctcacatcacgtaaaggaagttaaatcaccgaagcaattttttgaacagaacggaaaagcagcgtttgtagaagggctcaggctcagcctgcaaaaagtgacagaaaagtggcttgaacaggagaaagaaagcctttcagagcgatatgctgagcaggtgcgccgtctgcaagaagacatggcggataaaagcctgtcccagatccgcgagcagcgggacacttatttacaaggccttgcggaaaatacgagtgcaagggaaattgaacacctttacgaagccgaaaaagcatggaaaaagaaagatgaaatgctgaaaatttaaaaatccggttggcgggcagataacagtcgtggtagactaaaatgaaaaaaagcgagatgaaaccttttatgtcagaagtccataaagcaatttcagcacattccgcaaaacagcatcagcatgtcaaaacatttgtacagcttgattatgagcgtgaacaggccattgaagaagccattgtaaaatgcagacagaataaaccgttcacgacagatgccatcaatggcatcaccgcaaaaatgaaccagctggcgaaaaagggcatcgtgccgcaaagacgattcgtaagtgaagagatggtgaaagaattcgtcagcagacagtaatggatgaacctgccgcgtgtgtcatcagcgcttgctgtacatactatccgtatcttctctaaaggaggatatgaccatgggcagaacaaaactgggaaacagaaatgctcagcagaataacaatgccaaaaagaaaaacggcttcggacagaaatttgattcttatgccggccgtgaagctgaaaagctgatggcaagcaataaaagacacggtgagtaacgtgacggcagcatcttccaaatggggggatgctgttttttcaccgccttctttggtaaaataggaacattgaataaaaaggagtttcgatatatgaataataaattactgctcgttgacggtatggcgcttttgttccgctcgtttttcgcgacggccgttcatcgcaattttatgataaatgaaaacggaattcccacaaacggagtcaacggttttttaaagcatcttattacggcggttgatacgtttcagcccacacatgttgtctgctgctgggatatgggaagcaaaacgtaccgcaatgatttgtttcaagattataaagccaacagaagcgaaccgccgctagagctgattccgcaatttgatctagcaaaagaagcagcgcgggagctcggttttttaaacatcggcataaaaggctatgaggcggatgactgtatcggtacgctttctgccctattttccggggaagcggaaattacgattgtaacgggtgataaagatctgcttcaattgctgaatcatcaagttcaagtagcgctgctgcaaaagggtatcggcaattataaggtatatacagatgagatattcagagaagaaacgggagttccgccaaaagcgctgattgacattaaggcgctgatgggagacacgagcgataactatcccggcgttaaaggaatcggggaaaaaacggcgtacaagctgatacgtgaatatcaaaacatagaccgcttattagaaagcctcgctctcttgccgaagggccagcaaacgaaaattcagcaaagcttgaaagaattggagctgtcaaggcagcttgctgaaatacattgcgaggtgccgttagtctgtacgcttgaagaagcgcttttttcattgaagatggaagaggcggcattcatgctcagacgccatcagataaaaggaattgaaaggatgctcgaaaagctgaacgccagagagatcagctgatccctctagcgttttgtattgcttttttttgcgttgttttcaagggctgatttcgggtctttgtgcgcatttccttccatatttccctgaggattcacgcccccggtcagccggcctttattttcttttctcatagctgttcacctcatttgtaggatgaacagtgagacgcaatttcattccggttatttattcagccgaatcgctttttttgcgagctgatcggctgtttggttttgtctgccgggaatccacttaatgaaaaacaatggaaatccggcctttaactggatgatttcgtccacaaacggctggaaagccttgtttttaaccgcttcaagatctgtggcccgctccacgatatccgaatccgtccggaatgacacggactcaaatccgcgggcggcacacagcttcattccttcaattaaagcgagaaattcagcttcctgatttgaatggtcgccgatcggaattgagaaagattctgttttcccgtcatgtttaataaaaataccgataccggacgggcccgggtttccggcgcttgcaccgtctacataaatttcagcgggcatcatccgtcactctccattcggtgtcattcgttttgccgcatacgcataagggacagaaatgagtgataccgcaaatttaatcaggtaagttgaaatgaagatgctgaaccatactcccgcggaataaacgccgataaaggccacggcagtgaagataaatgtatccagcagctggctgagcgccgtgcttccgctgtttctgagccagagaagcctgtctgaaggaaagattctccgaatggctgaatatacataaacatctatcgtttggctgaaaataaaagccaagaggcttccgagcgcaacacgcggcagaaaaccgaaaatcgtctcaagggccggctgtgcgatatctgacgcagccggtttatataaaagagctccctgcatggcgcatgtcaaagcgagcagagtggaaaacccgagccagacggctttgcgcgcttctctgggaccgtatttttcattcagcacatccgttgcgaagaaaacggtgccgtacatgatatttcccagtgtcgccgtaagcccgaacagctcgactgttttgacaacctgcaagttggcgcacaccgtggcgaaaccgatccatacgaataggcccgttttgccaaatcctttataaaacagaagaacaatgataaaatgaatgaccgcaaataagatccataacacatcgttaaacaaaacctgctgacttcctttcaatttgagaatggtttgattatagcacacgcccgtcaactaatgaatggtaaggtgatttcaatgaatcttaagccgtatatcgaaatagaagcaaaaggaacaggccctgtcgcgtttttttccgaagattggctgaccgttccgaaagcgcgcatgcttgcaagagaagtcagccgctttccttatataaaagacatttattttgaggatgaaaaaggcgcgagctggacgcttaaagaattagaaaagcttactgaagagcttgcggacgaacctgacgacattacagtgtatttcgacggcggctttgacaaaacaagcggacgcgccggactcggaattgtcgtgtattattctctcggcggcaagcggcaccgcatacggaaaaacaaaagcttaacgcttcagacgaataatgaggcggaatatgccgctttgtacgaagcccttaaggaagtgcaggaacttggcgcaagcagaaattcaatcacgataagaggggattccctcgtcgttttgcatcagcttgacggcagctggccgtgctatgatgaaacgcaaaacgaatggctggataaaattgaagcgctgctcgaatccttaaagctgacaccgacatatgaagccgtaaaccgaaaggaaaatcaagaagcggatgaccttgccagaaaaattctctcggaccggcagattgaaagccgcataacattagaaggtaacggagatgactgatattggataaaaaaagcatttataaagaattgacagagcttcaggatgaatattgcaaagactgtttcgtaaaaaagcatttccgcaaagagtttggaaaaacgcacgctcattctttctgcatcaaccaatgcacggtgggggagaagctgaaagcctacggcaaggtgctgacaaatcaataaaaaataaaaccgcagtttctgcggttttatttttcgaattcatcgagctgatgctggcaatcgtcgagaagcattcgctgcttttgcagaaaatcctggtcgagagcttgcagttcactggattgtgacatcgttctggcatcctgaatcgcctggtaagcagattccaccaaagttgaattttggccccgggtagccgctcccgttgttttctgggccgtttctaccgctaattcaagctggcgtttatccgtcagtccgtttggaaaaaattcagagtccattaaaaaaacacctccgcaaatagtttggagattttttttagaaatatgtacggaaaatagaaaaaatatataaaatgagccgatataactattgaacctgattaattagggcttaattactattattcagggtatcttgggagagaagggaaaaaccagccgtgaatgataaagatttaaaaacaatccttcagcagacatttaaagaaatatacggtgatttgggaagtttagcggaaatggcgaaaaaaggaatgccgtcaatggagaaacaaattgaagaaatcgagcagcgctgcaagcagaatcttgtcgcaattgagattcagacggcaatcaaataggagaggcatacgcctctcctctatttgtgtcatctgatcaacatgtattgagtttagagttttacaacattagaagcttgaggtccacgattaccttcgacaatttcaaaagaaacttcttgtccttcttctaatgatttgtatccgtctccttcgatagcagtgaagtgaacaaatacgtcgtctccgccttcaacttcgatgaagccgaatcctttttcgttattgaaccattttactttaccgttttgcatattgcttaattcctcctagtactgtagcaccttcgtgctaaaaaaaattttgtcatcattcaaccgtacgtatgtttacgttgttaaatgatggttcaactatacaccatatgggagcgggcgtcaagcggccgctctctattttttatctttatttttccagtgccaaagcttatccggaaaaaacaaaaagcacacgaatcgtccgtgtgcttttctcttacgataatgccatatccgccttttcggccatcagttcagattcttttataatgtcctgcaaaatgacttcagaggagttagggaggtgaaggcttttaatattgtccttcatccggttcagcttctcctcatccgcgagaagggaggtgacagactctaaaatttcttcgtggcggttgaccacgacagccgcaccgcgatcttcaaagaaaatggcgttttccttttcctgtccgggaaccggtttgtacaaaataacgggtacgccgatcgccgtcgcttccgtcagtgtgatgccgcccggtttcgtgatcatgcagtccgtaatacggaacagctcgtcaattctttctacatagcccagcactttcagccggtcggcattgtcaccttccaagctgctgagggattctttcagcgagctgtttttgccgcataccaccacaacctgcacctgatcgtcatgaacgagattttcgcacagttcttttacgtttttcagcacaccatgcgctcccgccataataagaagaacttttttgtcgggagagagattgtattttttataaatcggctctttcggcatcgattcctcgaattgaggcctgatgggaatgcccgtgatctttacgttgttcgggtgagtgccgatttcaatcagtttttccttcacgtaatctgtggcgacataatatttatcaacattttcatgaacccagattttgtgaaggcagaaatcggtcataacgttgaacgtcgggatcacttttccggttctccgtctgtattccggtacgacaatcatcggaaatgtattgataataatgtccggcttatgctcttcgacgagctggcctaaacgtttatttcccattttaaaataaatattgaatttgcgtttattatagattttgtcaactccgtaataaaacaaacgataaaactgtttcccgattgagaagctttttaaataaaggtattgagtaacctctgaaacaatcggatttgactcttgatacaaattggaaaccgtcacatctaagccgagacgcagacactgttcgtagagcgttttggccacttgaacatgcccgtttccgtaatttgcagtcaaaattaatacttttttattggtattcaagtaaattcacctcaatgtaatcaacaacaagcaagcttcatgcatcgtaaggagttattgtctatagataaacataacacaagtgcatcattttataataagcgcggcaacatatttaaactaaatttaattgatatgttccattattttaaagttttgttatacgcatactgaatcaagagtattttatcatatttttgtcaccgtatcactcaaaacaaaaattaatcccattcatacggggtttcctgatatacgtaataattcagccaattcataaacaataacgttgcatgagctttccagcggttaacaggttctttcccgccgggtgcaaaatagtgcttaggagcttctacgtttgaaagatttctctctatgtctctctcatactcctgaagtagcgtatcggtatcatattccggatgacccgttaagaaaatctgtttttcgtcttttgaaacgattaaacagacccccgcttcctctgaaacgctgagcacatccagatccgaagccgattgcagctgctccgtattaatatctgtatgccgtgagtggggcacatagtatagctcgtcaaatcctcttaccaatctctcatgttttttaagaacggtatgctcaaacacaccgaagatttttttcggcagctccactttctcaatgccgtaatgatagtataaaccggcttgagcgccccagcagatatggagggttgaagtgacgttcgttttgctccattccatgatttccttcaattcttcccagtaagaaacatcttcaaacggcaggtgctcaatcggagccccggtaataatcattccgtcaaaccgtttatggcggatgctggaaaaatccgtataaaattcatccagatgctgccttgccgtattttttggagtatgtgtgctcggaattaagaacgtaaagtgaacttgtaaaggtgaattcccaagcatcctgaggagctgggtttccgtttggatttttttcggcatcagatttaaaatcacgatcttctgcggccggatatcctgatgaaaagcccggctttcatccattacaaagatgtgttcactttcaagcacctgcttagcgggcaggtgatttggtatattaataggcaacatgccacctccgttattccccgttaattttcttcattatagaaatttttaagccatttttcaatccatcccggcgtaataaaccgcatttaacgcataatgacaaggataaaagcggcaaatgggcataaattcggagcggctctttattatgacgggtaaagagccgtttggttcctcgaaaaaaacgttttccgttaagtggaaggaaaaagcggtttccgtttgttttgcagtgtaaaacaggtaaaataaatgaagaatgtaaaaaggagggccgcagatgacaatttacgatataaacgtacggaccataacaggcgaagacatgacgctatcggcttacagaggtaaggtgatgatcattgtgaatacagcaagcaaatgcgggttcacatcccagctcaagcagcttcaggagctctatgatacatatcgggaggaaggtcttgaaatattgggatttccctgcaaccaattcatgaaccaagaacctggaaacgaagctgaaattcaagagttctgtgtgaaaaactacggagtcacattcccgatgtttgcgaaagttgatgtcaatggagcagacgctcatcctctcttcacatatctgacgaaacaagcgaaggggatgctcggaacaaaagcggtcaaatggaatttcactaagtttatcgtggaccgaaacggtgaagtcaccgggcgtttttcaccgaacgtcaacccaaaagagcttgaagatacggtgcagaggcttttggcccgataagaggtgatacggtgaacgaaaaagagcagctggaaagcgtcaggaattgggtcagagaaaagcttattaatgaacggacgggccatgactggcttcatatttcccgggtcgcaacactttctgtttatatggcaaaagaagaaggcgccgacttatttatcactgagacggccgcgctggttcatgatctgattgacgccaagctcgaaaaaagcgaaaggctgacggcaggcgaagtgacagaacggctggctgctttcaacatcgcggctggctccattcaggagatcgcggatattatcacgagaatgtcattcagacacagggaactgctgaaaaagcggccgctttcattggaggggaaagttgttcaggatgcagacatgcttgatgcgatcggcgcagcgggcatcggcagggcttttatgtttgccggcgcgaagggtcacccgatgtacggaactcaaacaagtgtgctggcccatatagaggataaattaatcaagcttaaaggcttaatgaatacaaaagcgggggccggtttagcagaggagcggcatcaatttcttttgcagttcgccgcccgtatccaaaaagaggccggcatttgcaaaagctaagcggcgcaatagaacgcttgtgccgactatgttagaataagtgtcagattgcgcataggaggaccaatatgaagattaaatcaatagaaccgacgccgagtccgaacacgatgaaagtgattttgactgaagagcttccggcagggaaaagcaacaattacaagcccgatcaggcagatgatgctccggctgtcgtacgtgatattttaaacattgaaggagtaaagggcgtttatcacgttgccgatttcctggctgtggagagaaacgcccgttttgactggaaggaaattctgcctcaggtccgttccgccttcggaatggaacatacggagcagtctgagagccgttctgaacaggaatcgttcggtgaagtgaaggttttcgtacaaatgttcagcggaatcccgatgcaggtcaaattgacggacggcgaacgtgaagagcgcttcggccttccaaaacgtttccaagaagccatcttaaagctgcgttccgaagcttcaaatgttgtatttgagcgggcttggaaagaacaaggcgtgcgcttcggggattttaccgaaatcggacacgatgtcacagaagagcttcaggccgcctacagtgatgagcggctcaaacgtctgacagaagcagccgcacagcaaaagggtgaggccaaaccggcagtgcagcggaaagcttataaagtgacattggagatgctcaatgatgaagactggaaacagcgctatgcccatcttgagcaaatggatccggatgaagacgatttaccagtattggaaaaggcgctgcatgatccgaagacttcgatcagaagacaagccgtcgtttatttgggaatgatcgaaaaaccgtctgtgcttccgctgttatacaaagcgcttgaagacaaaacggtgacggtcagaaggacggcgggtgactgtctgtcggatctcggcgatgcgagcgccatcccggccatgatgaaatcgctcagtgactcaagcaagctcgtgcgctggcgcgcggccatgtttttatatgaagtcggcgatgaaagcgcgctggaagcattaaaagcggcggaagacgatccggaattcgaagtcagcctgcaagtcaaaatggcgattgaacggattgagcacggagaagaggcgaaaggttcagtctggaaacagatgactgaaagcagaaaaaaagaacagttataacaaaaaggtgcgccatgcaccttttttatttgaattcactttttataaaaattatttagaatattgttgaaaaatgattcaaaactctatatagtaagtacaatattaattgttggagggtttttatcgaaatacagaaagaatagaaaagcgagacagggcaaagacactgtaaaatttgcagaacacgccctagaataaactgaaaattttaaaaataatgcacagtctaaaaacagtagggggatcaccatggcagaattacgcagcaacatgatcacacagggaattgacagagcgccgcaccgcagccttcttcgcgctgccggcgtaaaagaagaagacttcggcaaaccgtttatcgcggtctgtaattcatacatcgatatcgttcccgggcatgttcacctgcaggaatttggaaaaatcgtaaaagaagcaatcagggaagcgggcggtgtgccttttgaatttaacacgatcggagtagatgacggaatcgcgatggggcatatcggtatgagatattcgctgccgagccgcgaaatcattgccgattcagttgaaacggtcgtctcggctcactggtttgacggaatggtctgcattccgaactgcgacaaaattacgccgggaatgctgatggcggctatgcggattaatattccgaccatttttgtcagcggggggccgatggcagccggccgcacaagcgacggccgcaaaatttcgctttcttcagtatttgaaggcgtcggcgcatatcaagccgggaaaatcggtgaaagcgacctgcaggagctggaacagttcggctgcccgacgtgcggatcttgttcgggcatgtttacggcaaactccatgaactgtctgtctgaagcgctcggtctggcgcttcctggaaacggaacaattctagcaacttcaccggagagaagagagtttgtgagaaaatcagcggcccaattaatggagaccatcaaaaaagacattaagccgcgcgatatcgtcaccgaaaaagcgattgacaacgcatttgcgttagacatggctctcggcggctcaaccaacacagtgcttcatacgcttgcgcttgccaatgaagctggggttgagtactctttagaacgcattaacgaagtggctgaacgagtgcctcacatatcgaaattggcgccggcctcggacgtcttcattgaggatctgcacgaagcgggcggagtctcggcggcccttaatgaattggcgaaaaaagaaggagcgcttcatcttgacgcgctgactgtaacaggccgcacactcggagaaacaattgcgggtcatgaagtaaaggattatgacgtgattcatccgattgacaatccgtttaccgaaaaaggcggtttggccgtcctatttgggaatctggctccggacggcgccattatcaaaacaggcggcgtacaggacgggattacaagacatgaagggcccgctgtcgtctttgattcccaggaagccgcgcttgaaggcattataaaccgcaaagtaaaagaaggagatgttgtcattatccgttatgaagggccaaagggcggcccgggcatgccggagatgctcgctccgacgtctcaaattgtcggaatggggcttggcccgaaagtggcgcttattacagacggccgtttttcaggagcgtcccggggcctttcaatcgggcacgtatcgcctgaagcggctgaaggcggcccgctcgcattcgtagaaaacggcgaccatgtcatcgttgacatagaaaaacggattttggacgtacaagtgcctgaagaagaatgggaaaaacgcaaggccgaatggaaaggcttcgagccgaaagtaaaaacaggatatctagcccggtattccaaactcgtaacaagcgccaatacaggcggaatcatgaaaatataaaacagaggcctgaacaattgaattccggccccctctatagtatccttgacttcatataaggattttagagggggcttttttatgtcaatggcttatgaagaatatatgcgccagctggtcgtgccgatgcgccgtgagctgacgggtgcgggttttcaggaattaacgactgctgaagaagtagaaagctttatggaacaggctgagggcacgacattggtcgttgtcaactccgtgtgcggctgtgcagccggtcttgcccgtccggctgcgactcaggctgttttacagcatgaaaaaacgcctgatcatacggttaccgtatttgccggtcaagataaagacgcaactgcaaaaatgcgtgaatattttacggggcaggaaccttcctcgccttcaatggcgctgttaaaagggaaagaggtcgttcattttattccccgccacgaaatcgaagggcatgacatggaggaaattatgaaaaatctgacggatgccttcgatgcgcactgctgaaatgcccgaattccgggcattttctttttggagaaaaaatgatcacaacgagttacagaccaagcgaatatacgatacacacagcgcagtcactcagtgtcaagctgggtgacacttactgcagccgcaataaacagcccattgaaaaaatgctggaacgagcggctagcgatcttttagtcatcggaaaggaacggttcgaactttacacgaagcaaggggagaagttcttttttcacccgaatacagcgatgttccgcgcaaagcggtttttgagaggggaagccgagccgttgttaaaagcagccggattacgcgaaggggattcctttttagattgtacgctcggcctggcatccgatgcgattttggcaagcctggcagtcggaaaaagcggacaagtcatcggcctggagaaaaacaagcttgtctcattgcttgtagaaacaggacttcaaacgtgggaaaccggaatggagcagctccaaaccgccatgaaacgcattcaggtcaaacatgccgactgcgccgattatttgcgggagcttcctgattcatcggtagatgtcatttattttgacccgatgtttcacgaacctgtagaaacgtcagacggcattgcaccgctccgcgcgctggcagaagagggttttaacgaagagtgcatcacgcaagccgtccgggcggcgaaaaaatgcgtagtgcttaaagaccattggaaaagcccgcggtttgaacgatacggcttcaaggtgctgaaaagaaagacggcgcttttccactttggtgtcatccatgtgagctcatgatatcatgggcttctttttcgttaatcagtgatttccataacgacaaaataaagcagcgtgagaagtgatacagtcgcaaataaagcgttaatcatctcatcccctcctttttctccttcttattgtaagcggtttatccgctcggtcacagttaccaatttcccatattgcatgataatacgctgccggacatgacgccgcgctttcatctatgctaaaataaaggaaaagaggacaataaaacagaggggaacaatctgtcatgaaattgtggatgaaaaagacccttgtggttctgtttaccattgtaacgttcggactcgtgtctcctccggctgctttgatgacagacaagccttcaggacagtcaagcagtcttgagcagaatgattacaccgctttttatgatgaacacgccctgccgggagaagagaaggcagggcgggagcctgaattactgtttcaatcgtatcagcagcagcttctcggtgatgctgaaaatcaatcatttttaaaattcggcagcaaaatctctccggtcattgaagatgattacagaagtgaaattctgccgaaaatcgaagatgtgatcacaggacatttggccaagtttcaagatgatgaagcgtatcaggatgtggttatttccagcaaaccgtcggccggaaaaactgaaaaaatttttcatgtgtataacaggctgacgggtgaagatcttttaaggttccacgtccgccgggatcatcctccgcaagacggctactggtttaattttcattaccatactgctgaagacggatttcaatcacatcatgagctcggcagcatttactgggaccgcaatacgccgcctgactggatgagcgtgtaatagcgagaagaaataaaaaaatcatttctgagaaattttgcagaaatgattttttattgtgttacactactaaaagactactttaaaaggatgaaaaaaatgaaacaatataaagatttgtgccgtcatgtgttagaaaacggagaaaaaaaaggagaccgtacgggaacgggtacgatcagcacgttcggctaccaaatgcggtttaaccttcaggaaggtttcccgatgcttacaacgaaaaagctccattttaagtccatcgcgcatgagctgctttggtttttaaaaggagatacgaatgtccgctaccttcaggaaaacggagtccgcatctggaacgaatgggcggatgaaaacggagaactcggaccggtttacggttctcaatggcgttcatggcgcggagcggacggcgagaccattgatcaaatctcccggctgattcacgacatcaagacaaacccgaattccagacgtttaatcgtcagcgcctggaatgtcggcgaaattgatcatatggcgcttccgccttgccactgcctgtttcagttttatgtcgcggacggaaaactgtcgtgccagctttatcagcgctcagcggatgtctttctcggcgtgccgtttaatattgcgtcttatgcgcttttaacaatgatgatcgcgcatgtgacggggcttgaaccgggtgagtttgttcatacattcggagacgtccacatttaccaaaaccatgtggagcaggtgaatttgcagctgacaagggatgtccgtccgctgccgaaactgcggtttgcgcgaaatgttgattctatttttgattttgcgtttgaagactttatcattgaggattatgacccgcatccgcacataaaaggagctgtcagcgtatgatttcgtttatttttgcgatggatgaaaaccggctgatcggaaaagataacgatctgccttggcaccttcccgatgatctctcatatttcaaaaaagtgacgacgggtcacaccattgtaatggggcggaaaacgtttgaatcaatcggacgcccgcttccgaaccggcgtaacatcgttgtaacctcacgggacgaatctttattcccgggctgtattactgccgactcggctgaggaagtgctcaagctgatcccggcagatgaagaatgctttgtgatcggcggcgcccagctgtacagtgcgctctttccttatgcggacagactctacatgacaaaaattcaccatgtctttgaaggagaccgtttttttccggaatttaatgaagctgaatgggaattgacatcccgcaaacagggagtaaaagatgaaaaaaacccttacgattatgagtaccttgtatacgagaaaaagaattgatttaagcagggggacaagaattgattcgttacggctgccttgtgatgtacgttgtatttatgttcatgaaaaatattcaggaatatatcaatcaaaaagagcttgacccgcggctttcttttcaaaaacagatgaggctggtgtatgagaggccgaaagcctttatgagaggctgcattgacgtgtcgggatcggcaatcggcattcatcatgaacagccgatcccggacggccccgtattgtatgtgcatcccagattgcgcccggctgatcttctgctgcttgcgggacatcttgaagagccggctggttttatcgctggcgagaaagctttccggatgccgtttctcggaaattggctgcggctgatgggtgtgatttgtgacggagacagccgggacgccgtgtttcaggaggcggaagtccgtctgcaaaaagggcaaagtctgattctgtctgaagacggcaaaatcaatccggaggaaatggcacttcgtttcgatctcccgattgtgcccgtcagcacttcgggaacagaccggctgctgcggggcagattactgaaacggctgaaaccggctgacattgaattacatataaagcccgcttattatccggccggtcagaaacggctccgtgcataaaaaaagcacagtctctatagagaggctgtgcttttttatttcagataaagggaactttgacgcaataaaacaaaatacagaaaaacatcgaggcgctgccgcctaaaacaaaactgtgccaaatggcgtgatgatacggaacctttctccaaatataaaatattgtgccggcggaatacaataagccgccgaaaagaagaaggccgaaaccggggcctgacagcgaagcgtacaacggtttaatggcgacgatgatcagccagcccatcaataaatagacaagcgttgaaaaaatgataaaccgcttcacgaaaaagattttaaacacgatgcctccgatggcaagcgaccaaacaataattaaaagggtcagaccgagcgcccctttaaggggtcctaataaaaatggcgtatatgttccggctattaatacgtatatcgcggaatgatccacaatttcaagaatgtcttttgtttttttatgctgaatgctgtgcaaaagagtcgagctgagatacagcagcagcattgaagcgccaaagattgaaaagctgacgatgtctgtcggcgagccgtatttcaccgcgaagataatgagaaaaataagcgccggaatcgacagcaatacaccgattccgtgtgtgacggcatttgcgatttcttcttttattgtgaacaatcaaatgtcctcctttttaaaggatttgtttttgcagtgactgcaaaaagctcaacccttctaatgtaatttttgttcctgcgcgtcctcggccttttgtcacatagttcatcttttctaagtaatcaagcctgtttctgacctgctggggcgataatgtcattgtgctgttttcgcttaattcggatatgctccgtctgctggcggattcgccttttgtatttaagtctttaattgattccaaaataaacaaaaactcttctttctccatcaatgtcagccgtttttcttttttcttagctgttttcgctttctggctgtttttgatatacagcgggacatcatcgggataaatcgtgctgccggatgctgccgcggccatatagtacgccgcattttgaagttctctgatgttgccgttaaaggtgtgccgctcaaacagcggataaacggacggatcgatatgaacatggtgtcccgtggctgtcagcatatgctgcaaaagaagcggtatatcgctttttcgttcagataaagcagggagcggaaggcataacacgtgaagcctgtaaaataaatcttggctgaacgtattttctgcgccggtatcgccaagatccgccgtgctgcttgcaatgatgcgggcggaaatcccggcgtccagctcggaaagaaggcgggtctgtaccgagagcggcatgtctccgatttcatataagaataatgttccgcggcgggccctgtttaatgcaccttcagcgctgaacagttcatattcgagccgatcttcgttttggctgcagtgaacggtaataaatagttcgctgtttctgcaggatttatgatggatcgctctggccatttgtttttttccggttccgacttcacctgttatgaagaccggcaaatcagataaggcaaattgcgaggccaaccgtttcgcttctaaaaaggtttgatgttcgccggccagctgataaaaaggatcagtttgttcaattacactcataaattggctccttttggttctaattggtttaagtataacacgtttgtgcgatcgaaaatatctttttctcttgtatcggttcatttatttttatttacaaaattaaaaaaattatcttattatttgaatattcatgttataatggcatattaaatagggatttaaataagaaaggactctgtaaatgaaaccgttgcttaaagaagactctctcatccaggtaaaagacattttaaaagcgcaccaaaatgtaaaggacgttgtgatacatacgcctttgcagaggaatgacagactttctgagaggtatggctgcaatatctatttgaaaagggaagacctgcaggtggtcagatcatttaagctcagaggggcttataataaaatgaggcagctctcaaaagagcagactgaaaacggaattgtatgcgcaagtgcgggaaaccatgcgcagggggttgcgttttcatgcaaacacctcggcattcacggcaagatttttatgccgtcaaccacaccgagacagaaagtatcccaagtggaactgttcggaaaagaatttgttgaaatcatattgacgggtgacactttcgatgatgcgtataagagttctgcggaatgctgtgaaaaagaaaaccgcacgtttattcatccgtttgacgatcccgatgtcatggccggacagggaacggctgccatcgaaattttaaatgacattgacgttgaaccgcattttctttttgcaagcgtagggggaggaggactcctgtccgggctcggcacgtacatgaaaaacatctcgccggatacaaaaatcatagcggtagagccgaagggcgcagcctcctattttgaatcgaaaaaagccggacaagtggttgaacttgagaaaattgataaatttgtcgatggggcggccgtaaaaaaaatcggcgccgaaacctttcaaacgctcgaaaccgtcgtcgatgacgttgtgcttgtcccggaaggaaaagtgtgcagcacgattcttgaattatataatcaatgcgccatcgtagcggagccggcgggtgcattgtccgtgtcagcacttgatctgtacaaggaagagattaaagggaaaaacgtcatctgcatggtcagcggagggaataatgacatcggcagaatgcaggagatgaaggaacgctccatgatttacgaggggctgcagcattattttatcgttaatttcccgcaaagggcgggagcgcttcgcgaataccttgatgaagtgctcgggcctgatgatgacatcacccggtttgaatacacgaaaaaaaataacaaaagcagcggccccgcattggtcggcattgagctcaagcatcgggaagattacggcgcgctcattgcccggatgaatcaaaaaggatttcattacgtagaggtgaataaagatcaggatctgtttcacctgttaatctgactttttttagaacggccgcgcaaaatgacagacacgctttctcagattgtatataataaaaagaaaacaatcgaaaaagaaggattgatatcttgttactcaaaagcctagagttcaaacgacaggacgggattcaggtaaaagtgacagaaataccggttgtcacggaaggtgaacattatttttttcaaattcatcagcaccttgagctttatttgagagaggtttttgcttcacaaagtgtgagaacagtgtattcattccgacaatatgtcaagcgccgtatgaagtggaaagattacgaggccgttttcaaccaagagattttaaaacataacgcataacggtgcatattccttagcgccttccttttgataagggagggtgcgggaatttttttatgatgaatgctgtaagcgttttatccatggggggaatggaaatgaaaaaaatgaaaatcttcgctgccgtcttttgtttgctgctcttgtgcgcgtgcggggggaaaacgataaaagacccgctgaactatcagattgagccgttttcatatcagaaccaagacggaaaaacagtgtcactgaaaagcctgaaggggtatgtctggattgccgactttatgtttacaaattgtaatacagtctgcccgccgatgacagcccatatgaccgaactgcaaaaaaaactgaaggctgagaacctggacgtgcggattgtgtcgttcagtgtagatcctgaaaatgataagccgaaacagctgaaagcatttgcttccaaatatccgctttcgcttcgcaactgggattttctgaccggttacagccaaaaggacattgaagattttgcgctgaacagctttaaagcaatcgtcaaaaagccggagggagaggaccaggtcatacatcaaacttctttttatttagtcggacctgacggcaaggtgcttaaagattatgacggtgtgcagaaggttccgtatgatgatatcctctcagatgtcaaagcggctgaggagctcaagtaaactggcagattagacattttcaaatctgaaaaaacatgttacactttccactagtagacggggaaggagcaaccagattgaagctgcgaatgttctcattgatcgccggactggctttgcttttatcagcatgttctgtccagcgcaccggttctgacgctgaagaaccgaaaacgaaagatcatattgtcatagctgcggtcggtgattcattgactgaaggagtaggagatcctgacggttcaggatacgtcggcagggcagcggagtcccttaagaaaaagggacatgtgaaaacggtagatattaaaaattatgcggtgcagggtgacaaaacgtcggacctgctggaaaagcttgataataaaaaagttcagaaatcattaaagagcgccgactatatcttttttaccatcggcggcaatgacttaatgaaggtgctccgccagaatatgatgcagctgacggttcagccgttccaaaaggaagagaaaccttttgaaaaacggttcaaggcgatcgtttcaaaaatccgcaaatataatggaaacgcagagctggtgtatgtcagcatgtataatccattcacgtttacgctgcctgaattaaaagaaattaatggggttgtaacggattggaacaagatcgccgcaaaagagctggaaaaagatcctcacgccgccgcggtgaatgttgaagacttgttcagtcaaaaaagcggcagcagacggatttcaaaggatgatgattttcatccgaacgcaaaaggatatgcactcatcgccgatcgattatacggcatcattgaaaaacaagggttaccagcagaatagggtgaaatgatgaaaaagtggaaatcgctgttttttgttcttctcgcactcaatgtgattgccgccgcggtaattgtgacattattggttatgccgggagagcaggcgaaaatacaagatcagacaaaaagtgagtacggctttcatatcacaagctccaaagaatctcttgccaggtttgtgaatgcgtacttaaaagagaaggcatcgaatcagcttgactacaaagtggacatcaataacgatgtgcacgtggcaggtaaaatcaaagcattctcaacctccattaatgcggttgtcacatttgaaccgtccgtacaggagaacggagatgtggttttgaaagtgacgaagttttcattaggcgaattaagcctgccgatcagctttgtgctgaattatatggacagcttttatgaactcccgtcatttgtgcacgttcattccggggataaaagcatcgagatccgtctgtcagaaatgcctttagacaacggcatgtatgtaaaagcggataaaatcaatcttgacacggatgaaattgaattttcctattatcatccgaaacaataagttttcataaaaaaacacagatcctttcagggatttgtgttttttcgtgtcagcgttttttgtctagtttgctgaacagtttgattaacgttgcaagctcttcatcagagtagcagtcaaaccgtttaaaaaagtattctgtttttttctggttgaaatgatcgacaattttctccccggcttccgtaatatggattctgataattcgtctgtcctctttagaacggatgcgggtgatccattccttttctactaaagcgtcggtcactgcggtaatgtggcttgcggaaacctcaagaataggggcgaattccgttacttttttaggcccttgttcactgagaatccgcaaaatggtgaattcgttcctggacagctctttatctagaatttcattaacttcatttctgatttgtttaaacacttttcgaagcaaagcttccatatcatacatcatttgtgtccttactttcaaatcatgaacctccaatatgtagtcagcgtggcattcgtttagcttcccctgaaagcagaattatttttattctgtttatacatgctataatataataataccacgtatgaacaaaggagggcacccgtatgtcagaaaaaaaagaaatcgccacatttgcaggcggctgtttttggtgcatggtgaagccgtttgacgaacagcccggaattgaaaaggtggtgtccggctatacaggaggccatactgagaatccgacttatgaagaagtgtgcagtgaaacgaccggacacagagaagccgttcaaatcacatttcaacctgacatttatccgtatgaaaagcttgtcgagctgttttggcagcagatcgacccgactgatgcaggcggccagtttgcagaccgcggaagttcatatcgggcggcgatatattaccataatgatgaacaaaaacatatcgctgaagcctcaaaaaaacagcttgaagaaagcggcatatttaaaaagccgatcgtgacagacattttaaaggctgagcctttttatgaagcggaaggctatcatcagcacttttataagaaaaatcctgatcactacgggcgctaccgtgtaggttccggacgtcaaggctttctggatgagcattggagggacagataagatggcttttaataaagaagaaaaaatcaaatcattaaaccgtatgcaatatgaagtcacacaaaataacggaacggaaccgccgtttcaaaatgaattctgggatcaccaagaagaggggctgtatgttgatatcgtatcgggaaagcccttgtttacttctctggataaattcgattctcattgcggctggcccagttttacaaaaccgattgaggaagaagaggttgacgaaaaactggacacaagccacgggatgatccggacggaagtgagaagcaaaacagcggattcccacttaggccacgtatttaatgacggcccggggccaagcggtctccgttattgcattaactctgcggcactccggtttattccgaaagacaagctgaaggaagagggctatgaagcctgcctgcatttatttgaaaaatagagctcagcaatgaggcctgcctatcagacaggccttttttctatgtttttttttcttcatgtaatcgttcaataatctttacgattgtgtcttttgtgatgagcggcgcctgatcggattgatatctggggagattgaccttccgaaattccggatgtttggcggggtcgggcaatatcgcgtaaagattgccccattcatataaagattccgtctcatgaggagaggtcagttcttcatgaagcttctcaccgggacgttttcccacttcaacagcggcggggcgcggcagcccgtgccgggacgcatattcctcaaacccgtgaagcagttcttcgagcctcagggactccattttaaaaataaacgtttctccgccctttgtaatcgccgcagattgcagggtgagcgttgcggcatcatcaatcgacataaaaaacctcgtcatgtttttatctgtaatggtgagcggaccgcctgccatcaactgctcaaataaaataggaataacggaaccgcgtgaacctagcacattgccgaagcggaccgaacaaaataccgtaccgcggttttgaacatgatgattcgcctgatgaaacagcttctcggacaacagcttcgtagctcccattgtgtttaccggggaaacggctttatcggttttttaaggtatttactgtattgtgagggactatcagtgacggtgaggtcgaaaacgaaaaattaaacctcaggataggggtgatttcaaactgagccggaattggcccttttcttttttgtgtcatagtaacgataacttctttgaagaccattcttaatagcgagttctttttttctgtgcttgattcaatgtgatattgatcaattatcttatttatgttgtttctgactgtattactgtctatttctgattgcgcttcttgggttccattgagctcatgcttggcaatctggagttctttaaattcttcatctaaaacagcttttctcttcaaaaaaagttcatcagtgtaaatgccgctctcatatttctcgaagataaaattctctttgttttttaactcttgttctttttgtgagagatgttcagacatttgcttttttgttttcacattactatttacgtcttcgtatttagaaatcattgaaatgatatgttttgttaaagtcttattatctaagttgcttaaagaagagaggtaatccagaatggcattttcaacatcgttatatctcacataagtgcatttattctttttgcaagtgagtgatttaacgtgatatacactttccgtgccgtttttgttttctcgcgttcgcctagtttcgtatttagataatggttcaccgcacttagaacaagtgcatacgcctgccaattcacttaattccaatgcgtttttattaggcagcagggggactttgtttgcaattttctcttgtgattgttgaaattgttcttgatctattataggggcatgtgcatccgatactacaatttgttccttttcaggtctaattgttcgtttaccgtcttttgttttttctctaaccttatatttaacagttccgatatacgcttcgttttgcagaattgctttaattgtgtattgattccagcgcttttttcctgatggagtcggtatttgtaattttgttaagtgagaagcaatcgctgtataactataatcttttccattcaacccatttaaaaagaggttaaagatgaattgaacgacttttgctttttcttcgactgggactagtttggatgtttttttgtttaaccggtatccataaggcgctagtccggaaatccatttcccttgtgccgcatatgtgtatttagcgcctgtcatacgctctctggtcatttcaaattcttctctggccataaacaattcaaaacgaatctgacgcatgtctgcaggatttcgagggtcataaactttatatggtgtaatgataatcaatcgcttgctttgaagaaggttaacaatttgtcccgcatcactgtagctcccgcggctgagtcttgttatttctttaacagcaattgcctggtacttgccttcctcgaggtctttaagacattctttaaaaacagggcggccctcaatgctttcccctgacccgatttccatttttaattcataggggatttcaatcgacttcagtattttattcatgagttctttttgttctgttagcgtatcttcgcctgttcttttttctcgctccatatcctgacgagagcgtctgagataacctaaaatatttgtaatgttgtaagaatgaacgatgttttttaactccaaaaaatcagcacctcctctttattgtatttactgtaaaaacagaagtattcgtacaatattctgtctgacattgaatacgaaaataacgtaatattgtaaggattgtattgtttgaatattgatctattctaatcggattcattttttaattaaacgccgactgtaattaacagggtttttattttgttcatttaatcctcatatggcagcgcttatgagcaactataacttgaaaactaaataaaataatggttttatccataaacaaagaacttaaaacggtgggggaaatatcaaaggaacttaatatcccagactggggtattctgaatctatttaaggcaaaaaaagtggacaagctttcttactctgaattgtcaaagaggaggagagcaaaagactttgatctgctatacgatctgcatttcaacaaaaaaatgagcctaaaagaaattggccggaaatataattttcgcctccctacatccgtcaagtttttaaggatcaaggaattgagcacttggcgtttaaaaatcagaataagaattaaagaaattaacggatacgttaattctaaaaacatctaagactgtttttgagaacagtcttttttatgtagtaaaaatagcttaaattgtgaatgaatatttgatcaccgtagtgatttctgaacagtttcaaatgtaggaccaccttaccttttttaaacgaatataataaaaacagggaaaaatattagtattttatggtattgtggtcaatgtgttgaacaataaaattagggataaaggagagttcaaattgaaaagtctatttgctaaaattcttttgatgttgcttgcagccgttatagccatccctactgttggagcttcggcctcagaagtgcaaaaagcgagtgtttctaaacaggacgtgcaatttacttataatcctaccgagcttcaaaaactagctaaagaatactcagtcccaccagttaaagaaaaaggcattttaaatgctgctgaagaattaaaaggtctcgaaaatggtaactcacaagatcaaatgagtactatgggagctaaaagcgccgcagctaaagaagcgattaaggttattagaggactagcgaataatgcttgggcaaaagacattttaggtacaatgtttggaaagtccacggtaaacaagattattaaaaacacaaacaaaatttgtaaggttctcgaagatataaccggggctcctaaagaggttgctgctatggcaagaaaacaaattccaccagctattaaaggtgcagttggcgcaggagttgctgaaacaattggcatggcagtagaatatatcatccttgctgcagattatcttgttctttaaatactaaaattaaaggtgataacatgactggaaatcgttttgtagactggtgtaacgaaaataacctaaattctgaagacgaaacttttctcgtccagttgtcaggtgcattttgtaattatgaaaatgataaagcgaaagaaatgaataaacaactattcattaaccgatacggtgaagagcttggaattagctccattaaaggagataatcgatcagaatatgaagaaattattcgtacttatgaaaagaataattacaagcagaacgaaattaatatagatgaactgcttcaggcattatttgagacagagatgatgttatctttaaaagaaaagttttgataaaatcctaattgatgtatcataggggtttaatcagccactataggccacagagtccctcacacgctctgtggtttttttgtttagattgtgaatgtatccaaataaaaaaagaagcctcagaggacttcaaaataattaattcttctcacatgcaaagttgtcattatcccgatccatcttagatgtataagcagggtgagtgcttggtacgccatgcggatatttctttctcagctctgtgcagtttgcaaagtgttctgttcctccagcagaaggggaggcttgtgcagagttagaagagctgcttgatgctgaactgcttgagttcgatttatgtgtctctgattggtgtgttgtaactgacttttgagccggcttagatacacttactgatttcttcggtttcgttacgcagccattaaatcctttatcagtcgcatatccattcttactccaaatcttcaagtctttatctttcgcagcttgctcatctttcttatacgtgtctaaatatttcgtgtttggctcatacacataagctactcgtgctaatccttctttaagcagtgtttcttgtacagatttgccatctgcataaacgtaagccagcattctcccatacttgtctgtacgatctcctttatcaaactccagttgaagttttcccttgttaactagctgtttgtttcttgctgaagcatcctcaccatatggttgtacgcaagagtttgggttcttagtttcaggagtatcaacaagcagataacggacagttttaatttcgcctttatagttaactttaatcgtattcccatcaactgttctgttaagtgttacatcgaccagctttttctttttgtcagacgcctttttatccgacgaatccttctttgaagcattttcggctttttcatttttgtcatttgattgagtgtctgcctttgtctcttttgcatccttttcttcttgctgcgttgttttagctttatctgaatctgttttatctgtagaagcagaatcagatccacacgcagccaaagaaaagcttagagataatgcaccaatacctaacagccatttcttcaatgtaattcccccaatttgtttgttctgtctctatatcggacaaaccttcctaattataaatataaaaccaaagattgtaaattatgttttggcattttaggacactcaaatacagttgtgtggtaaaatttagtgacctaaacaccttagaggagggaaatttaaatggaagaaggaaagttaattcgcatgactcttgatgggataaaggaagccgtttctaaatacggaacttttcctatgctccaacatggagggcatgtcatggaagatgctgcttttcaattcagagacccagccagtcctcaagaaattaatagtttagaaaagatgttaggggtaactttgcctaatgattataaagagttccttttcaatcacaatggaatggaaatgtttaatggtattgagcttctaagcacagaagggataattgaatttaatgaaattcaagacttccctaagggatatgtcctaattgggtatcattatgatggcaggtatgttattgatgtaaacaaatcaaataagggattaggatatatgttgtatctggactcaattgataatattgaagatgcggtatatttaaattctaactttgagatatggtttgacatgttggtgtcatcaaacggaactaaatactgggaagtgaagccggaaattcaagagtattataaatatgtttcagaataaaaagtttagataagatcaagtagaaaggagccgtaaatgaaagtatttgaagccgcctcgttcatttcagccgcagaaaagcgagcaaaagaatacgatcagattagagaacaatttatcaatctcaggaaagcttttcagggaatggctgacttagacgacagtgagttttcaggcaaaggcgcagacaacattaaagcattctttcaagatcacgctggtgtcacagacagctggcttaatctgatcgatatgaagattgcgtttcttaacagtatttcaggaaaagtagctgatgccggattggccgattcgtttgtggaagagtcctttttagaacacgagctgatccatgcgaagaataaatcacaagctatcatgcaggagcagcgcaatgaaatgaaaggtatccttgatgaaatcagagatatcattcatctagaagttttctcgacagaagatgtcgatcaaaagctggattcagcagataaaaaacgggatgagaccatacataaactcggcaaacttgatcacgatctaacgaaagaatacgcagaaaccgaggcaaatgaacatttcatccaggccgattttcagcagctccaaaatgcaacaggcaaaggaaaaggcgccacgccgcttcactacaacgccaaggcgtacagagaaagtgacatacataagaaaaaaggcgagattgcaagacactcagacgcttatttgacgattaaaaaggaagaagcgaaagagcgggaaatcaaggatcttaagaaaaagctcgctgatggagtaactgatcctgatgaatacttgaagattgccaagaagatcggttacgagaaccttgaaccttcccagcagcaatatgtgatgcagcttgaacaagcaaaacagatggaagaagccggagaagtgacttgggatattttaaaaggagccggcgtcggtctttatgatgtcgggaaagacacggtaaccggtttatgggacttcataaccgatccaggagaaacactgtcagcactggggaatgctgtacttcatcctgttaaaacatatgatgctgtttcagcagctattgaggaatcatatcaaaaggatatggcaaatggagatgcgtattccagatcaagatgggtgacatatgcaattggttcagcagctgtggctatcgtcggaacgaaaggcgcaggagccgttaacaaagctgatgcggcggggaaggtcataaacaaggcaggacaggcagggaagaaaattaaagacgttaagattgcagatttgcttccttataactctaagtatgatcttgctctggcgggtgacgtaccatacaatgtggttgacagccaaaaccttaaaaatgaactattaactaatgcgaagaaattagatgagagcagaaagccatttacaggtaaggaattaactctcccttggctaaataaagagaagtatggcgcctttgaagttaaagggaaggtaaaagcttcgggtaaaactaaagatgtaagtcgaagagtatacacattgaaagatattgatataaacaaagttgatgctgaaagcggaaaaacaaatttacaacttatgaaaaaaggtgacgctccttttgctaatgatggcacaaaaatcaacttacatcatttaattcaagaagagccaggaacgatggtggaaattcccgcttctgttcatcaaaataataaaaaagttctccatggattgaaaaaaggtggggaaagttttagaaatgacagggagttgcggaatcagtataaaagcttccaacgaagatattggaaatggagagcgagccaatttgagaaaggagaaatgtaacgatgacttatcatgaaattgaagaatttattaaagaaaacgctgaagatgatgattttacaggcggaataagtgaagaaaaaatcatagagatacaaaatcgtttaaatgtaaaacttcccgagagttataagtggtttttaaataaatatggctccggtggaatttacggggtaaatatacttggccatgggaaagtttctgcaagggttgttacagttactgaggaatatagaactcattataatttaagtgacggtattatcgttatagaagatgtagatgaattctcttattgcctcgatacaaacaaaatggaaaacgacgaatgtccagtaatagtttgggcaaatgaagccggttatggtgacaaggttgcagataactttctgcaatttttcttggaagagcttgaagaagcaaaagaaaattgggaagaggacgaagatcgggacgattaacttggtaaatcctctgaaacgctgatgagaacattcgatgatttagcgccatgtcccgagattaataaataatttatgaatgaataaaaggaataaagttttccttgaacagcgaggagaatagtgaaaatgtatgaagaatatagtaagcaatctttaccgtcaagaaagtatagagagttgttaggaagcgcaatctgtgttttcaactctaacaatgcatttatcattgaaaatatacttaaaaatgatgaggaaaacaggtttaattggcaagaattaattgattatacttctggtcaacttagtcaaccaataaaggaaactataactaagttttcaggtgcaaaaattacttcgtttttttctgaaatcattgaaatgagaaatagaattattcatagctttcgaataaccgatggtgatggtaaacagactttagcaactaaacataagcatggaaaacagtttattattacagaggattacctttatcattttattaaaaagaacgaagagttaagtgatatccttcatgaatttagaggccattagttctatcatggaaaagggcgagcgtctttttcaaaccactccacaaattaaatcagagttaggctaaaaagattgtgaagggttacacttaaactatcgggtgcattagttatacaacaaccaacatctgttgtactaaaatcctgttcatctattaggcctacgatttctgttgaagaagcaaatagagttgagtcttgggtaaatgaggattttgaaaaaagggcagacttgctttgtggtggaaaaagagagggagcattttatccaacaggttttgagggcatacctcacgactgtaggcttgctactaagtaaagttttggccctgttgtttcgctatataaaattggagatcttgaaaacgctatttcaaaatctaatgatgtatcctatggtttacaagctggaatctttactcagaatataaatgcggcttttaaagctataaattaattggatgttggttgagtcatggtaaacatggttctgattatcggatagacgttatgccttttggtgggggaaggatcgggtttaggccgggaaggaataaaatattctatcaggagatgactgaacaaagcagtatgctttaatatttcaaacaaagggaaaacctttagagttccgaattagtctcttaattgtatttgaaatgaggaaggcactgttatatcttgagattagaggagtaaacatttgattattcctcttttttgagcagaaataaatacggatcaaaagcgatcttttatacacctggaggcacaacattgcatagagcaggtttaacaggtgaacacagatcataaaaaaacaccccctatgcgggagtgccaaaacatttatgcggtttgccctcggcgttccgctgagaagtcattatggtgatcaagcgcgatgtggatactggctgtatggcctcttcgggcttctttaaaaactttgtggccgtcaagaagataatgtccaacaagcccaagtaagataactaaaaagataaaagccgatgcaaatttaaatttcataaagacaatcccctctctgaatttgttttcgggcataaagcactttctcataaaaggctgtagctactttatggtcttcatttacattataatacattgctgcatcagtcgctaggtcttccacatctgaaagcatagcttttgattctaagtaatctaagattttaaaaagtcgttctttgtcattctcaacgaataaacccataagaaaatcaaacattttctctaatacgtcatcgttcaaatcctttgacagcataagaccttgttcacaaacttgttttccatcaactgtgttggacaacttaaagtgcgtttttgccagcattaaaagtatgtcaagcagtcggctagaattgtgaagagaattagtttgataaattgagacgccttctttaaaatactccaatgccttctccatatgtcctgttgtaaatgagcataaaccgagattgtacaaagaagaacctattaaccgtggcatatcaatttcttgtgcttgttttaatgcattcatgaaatgcggtattgctttttctggatactccatgtctaaataattcagaccgatgacgaatgaacattggattactcttattgagtacgtttcgtgtgctttgtaggtttctattgcttgaacgatatgatgcatagacatgtgggtttgcttcatgtgatagtacacttcagcaactttatagtgaaattcagctcgctctatttcatcggggacaatagatatcttcttttcagctcggttgtaaaaacttattgctttaagatattcgtactgttcaaattcatacatcccatgaaaaaagttaaaataatattcaagaattccttttagatcgctttgtttactttcgatctcttctgataagtctgaaattttaggtcgtttttcattcatagtttttggttcaagataatcaagcattaattgatgtcgaaaacacatgagcgaatagtacaacaataaatcttgatcttcttccataagctctatttcttgcttcacttcttccttcaagatttctgcatctgcaacactaaataaccttatgtatttgtaccattcattgatttttaagccaacttttgaagaagagatcaattgctccaaaaaaatcaccctcctagtatttcgtctgattatgtaatattttatcataatgtaatatgttgggaagggtgttttttcttaatttctcaattcggtgtgacatgcgatagaaccccccctcgttagagaagggtacgtgttcagtttgctgttgcttttagtaaggcaagccattcatctaatgttcctgagaaaccttgttgaacggctaattcatatgctgattttccatctttacggcagcaccagtagctcctttagctccagtactgcctttttcaccttttaatgaagctaaccattcaaaagtgatgaatattcaaggcgggagtaagggaaattaacaaaaaaatgtgagggaatttagatgaaacgatttatcttggttatacctttattggctgctgttattgcctctccaactcaaatgaaagcaagtccaatgccttgtagtgcagtactcgaaccggtaaatcaaaaactgaaaaatgcgaagggtgcggcactaatctataaagtgcagttatacccgccaagtgctgcaagaacgaatatgagtattcttgctgtccaccttcctcaaccatcttcttatggaagctatgacggttatgaaggatttgcctccaaaacaggggaaatcagttggcgatttaaactatatccgactcccaagggagagagtcctaattgggctggaaggattgattccatatcagctgaaatgacaaatgttaaagtgcaagtgcgcctttcaaattctaagacgcaaaagttggggccaagtgtattaacaaacaatattcaatcttgctattagaaatgtagagctcttatcaaagagagcaatgcgactggatcttttgtaaattgtcaaaaaggtaattgatcgagaaattctggtgaaaaatgaagaagagtccattaagatggaatgtctgaagtcaattcatcatttgacagaagagagccggcaaaagtcgatattgcgtttgattttgtacatagaaagacggcataaaaagaaatggttagctaaaaaaaggcaaagagtcaacgctctttaccatcaggtgttttccttaagcggtctgcaatatgcttaattaaattcagcgcagcagtcactaatccaataactaaaacaatttcaagtaagaggataaatccaaaatttaaaccgcgactttcaaagtaatcatcggtaaaaaagagcaattgataaatcccaagcattagcacaataaaggaagcgcctataatcgccagagactttttagagaactccttagtatggttaaaattataaaccaataagaacaaaaatagacaagccatggcgatcttatgagtcaatgaatcacttgctgagaacccttgcacaagtaaggagataattaatccggtcattccgattattttattcatgatttcaccttcattagataagtatgatctggtgtcagcttaccaattaaaggtgatattctcaacataatgcagtttaaagttaacttaaaatcgtaattttaagaacaaatttagagtggatcatgacatgctgtttattatgctgtaaacaaacgcaacaataaataatggataaaagataacagcaattagttttgaagatttgctctttttttcaaatgtgtatattagtgcaaatcctaaaaagaatattgtgacaaaccaagaagaataggatgggtacaatgcaataagtaagacaataagagtggataacgcaaaagaagagtttagtgttattttctgatcgtttttcaaataaaccgcctcctttcacatattcccccatataaaaacacttaaacattatattaagtcagcatgattaaatgataaacattttacgtcaagaacaagataaagcaatccggcatttcaaggacaagctgaacatatccttagttaatttaaactgcttagagataagcaaaatgattttgcggaaaggctgtatagacttagaagtcagaccttacctaaacattagatcgcttaaagaaggtgatatggttgatcagccaatttggatttagtgatgtaattgtgtggttctatgatggtgaagatctcgccgtgttccataagactacagggaagttgtttaaatccttaaaaatgaggcgttttagtctgtcatttcctaaaacagtgttttactcttgtcacaaatatgcaagaagggcggtttgaacttgtatagagtgtttataatgctgttagttttgttatgtataacattagggtgtcaaaaccaacatatcaaacattttatggaggctgagcaaactatggtcggctatgtcattttaaaaagagagaatcaagcaattctcatacctaatgaaaaagctgatgttaaagactatgaaaatcttagtgaaaaagagattattgaaaagtatagatcggatatagttttactggggcttagtcaacttaacaataaagatgacttgagcaaaggacaaaaaattcgtatttggtataaaaaattaaatgaatcttcacctccaaaaacaaacatctcaaagtttgaaagtatttagtacatctctttaattcctaggaataccgctgcaaaactgaagcggcattttaaacagaaataatgtcttcaaacctcatctcattctttattcgcggtggcttattcctgccccgagatttatttgacgattgttgactcaggtgcagagaaggcatatgtcaagaacacattttgaattactgggcaccttgaataaagccagcattcccatattcatatgcgaagagatcggtactgaacgctggataaagaaaaaagttaaccatacatttgaacaagcttgcgaggctttgataaagaaagaacagtcaagagacgaaccattacatacatataatactcctgtgaaagcgggggtgtagttttggaaccttaccaacgttatgaggaattaaagaagaaaacaataaaggttgtccataaagataattacagtatccgctatatagatcaggatgaagcgagtaatgacttagatgaattttataaacaatttgctcagcatttattggaggctgctttggaaaggagtgcagagtaagcttctttttttgatttgtttgtggtaagtatcttaataaacggctttatcggtactgatattaatcacatgtgtcacttcttgcagcaaagcggcttctgcgacattttgtccgccgataaggttggtttgaatggcttcaaagggattatcctcacatgtcggaacctgcttcagcgcagctgtgtgaaagacaatatcaacacctttcatcacttggttgactcttctgtagtcacgaacatcgccgagcacaaacgacagtctttgttcatccgcgtatttttgtttcatcacatattgtttgctgtcatctttgctgaacacaatgatttctttaggggttaagagcaaaaggcgttttacaatttggcttccgattgatcctgtcccgcctgtgacgagaacagttttatcgtgaaaaaacggttgtagctctactgcttgctgtttaggcatggcttatcctccaactctcgtttctctaccatgcatcatatgttgaacaatttcagcgagttaatgaaagaaaccaataaatcaaaaattagagaaaaacattaatctgatgtgctttcatatcgctttacccgattaatagaatagaacttacaaataaaacaatgtactaaatattcatcgagaatatttgctcacgtcaattttttctcttcataaattctcacatgcggacaatcttcacaaaaacttaacactgaacttcctgtatgtattttacaattaaagtgcacgttcataaaaggaggatggaaaatgaatcattcaaaaacacttttgttaaccgcggcagccggattgatgctcccgtgcggtgcggtttcttcccaggccaagcataagctgtctgatccttatcattttaccgtgaatgcggcggcagaaacggagccggttgatacagccggtgatgcagctgatgatcctgcgatttggctggactccaagaatcctcagaacagcaaattgatcacaaccaataaaaaatcaggcttagtcgtgtacagcctagagggaaagatgcttcattcctatcctaccgggaagctgaacaatgttgatatccgctatgattttccgttgaacggaaaaaaagtcgatattgcggcggcatccaatcggtctgaaggaaagaataccattgagatttacgccattgacgggaaaaacggcacattacaaagcattacggacccagaccgcccgattgcgtcagcaattgatgaagtatacggtttcagcttgtaccacagtcaaaaaacaggaaaatattacgcgatggtgactgggaaagaaggcgaatttgaacaatacgaattaaatgcggataaaaatggatacatatccggcaaaaaggtaagggcgtttaaaatgaattctcagacagaagggatggcagcagacgatgaatacggcagtctttatatcgcagaagaagatgaggccatctggaagttcagcgctgagccggacggcggcagtaacggaacggtgatcgatcgtgccgacggcaggcatttaacccctgatattgaaggactgacgatttactacgctgctgacgggaaaggttatttgcttgcatcaagccagggtaacagcagctacgcgatttatgaaagacagggacagaacaaatatgttgcggactttcagataacagacgggtctgaaacagacggcacaagcgatacagacggaattgacgttctgggtttcggactggggcctgaatatccgttcggcctttttgtcgcacaggacggagaaaatatagatcacggccaaaaggccaatcaaaattttaaaatggtaccatgggaaagaatcgctgataaaatcggctttcacccgcaggtcaataaacaggttgacccgagaaaactgactgacagaagcggaaaataaacataaaaaaagcagcttatccaagctgctttttgatgtgaagagcgtttcatgagaaagtcttggaacggatagccgaaagcacagccggcagccggtcatacgtgtacgccggtactgtctcttggtaattaagcgccgcgatttgtttacgttcacccgggtttgtcatataaaattggatcttatccgcaaaatctgcaaacccgctgtaagaaacaaatgatgaaaacgggggcgcgggagaaaggtctgtcagctgaaaggcctgacaagccgcaatgtctaagcttctcgtatttaaactgatattttcgatgccgcgtccgttctgattgagcgcaaaccgataagaacggtgagggtttaagaccacgtctgcgctgttgtaatataaagcggcacgttcgggtgcaatccattcatccattacgagcacattttgctgcctggcgatttttttaggcagatgtctgcgccatcccttcccgataatacgaagcgtatacggaagctttgccgctgctttcaccagttcaacgcggttcggatacgggtatccgatcagaagcagatttgtgtgaagagaggcttcagcaggttgtttcttaaaaagccgctgattaacggggatcgggacataatatacgtgctgtaagcccatttgccggtaagcatcaagcgcgttttgttctatcgtcaaaacggcatcggcgaaaggggcgattgtcatgctcacatcgaaataaaaaggatcctccgtcatccatagataaacgggaatctgttctgtcttcagccattgaagccattcagacggaatacggtctcccgtcatcatcagactgatgtctggtttgaatgcccgtatactgcggatggtatcttcctcaaactcagaaacagaaaaaaagcggacggaagactgtaaaaagccttcctcgatccagcggtcaaaatacgtgtatatgcctttatatcctgaacggatatataaaacgttcatatgctgttacgaagtgaacgtgacactttcaactttgtcgacgtcaagcaatgttgtagcagaacctgccggtgtaacggaattttcctgcgtaacaaaaacgattccgtgaatttcgtcaaaggcaacaaattgaaccgggccgatcatgtctcctgaatccatcacaatgctgatgacagtgccgggctggattcttgcaaaaatccatctcgccgctaatgaaataccgcttcccaatacagattgtgcgctgagactgtctttcgccgctgcttcatctatttttgcatcaattgccgattccaataaatctttcactttgttttccacattatctcctccatctgtgccgccagataaagcgctgttgtcaaatacaggggctaaaagagttttcaataactcctttttaagctccaaacgatcctcgctcatgcggacatacacctcctttaacaattttaacctcacgtttattcatattcctgattgaagagattggtataagtcgaatgccgttttgcttgtgtttttttcaatatttaatcaaacagctgaattttcgaatcaggctttgtttgcctatgcggattgtaagagtatgacatacgttgtatagattaaaaaatgaaggagaggaatactttggattcagaagaaactgtaaaacacgggggttttgaggaggaatttcagctcgtactgcttcttcttcttttgttatcccgtcagccgtccggagatcattcagatttgcggagtcagcttgtaatggcaaaagagcttggaattcctgtatcacgcgtcaatctgattaacggcagcacactgcaaaacgtaattgtcaaagaagtactgtcagatttggccgtttttcaaaatccgctcaataatacgagatcaaacgtcgcgatttcaagcatcgtcagctggggtgctttttaataacggatatcaggctctgtctctttcggagccgttttttacgttttacagaaggggtgatgggatggaaaagaagatctcaattatcttaacgagttacaacaaaccggatcttgtgaaacaggcgattgaaagtgttttgcatcagacctacagcaattgggagctgtttgtgatggatgatcattcaaatgaagaaacctcggctgccatcagtacgtatataaaagatcctcgcatatattatgacaacagttttatcaatcctgccgaacggctgaagtcgacccggtatgccgttttgattaatgatgcgctttcacgggctaaaggcgaatacatcacttatttgacagacgacaccgtatttcatccggataggctcagccgcatggcggaagcgctaaatcaatgcagcgagtttgatgccgtctattccagccagaaggtgatacatgtaaacgggcgcggaacagaacaattccacttctatcgttttgctgaagaggtgcttgatcaggccgcttttctcgttgatcactgttcagtgatgcaccggagatcattgcttgagcgtgtgaaagagaagttcggcagcttttgggacgaagatgttatgcattggaatcacggagactctgttttttggagcaggctcaacacatttacatcatttctgccgataaaagaagtgttggatacgacctataaaacacctcactcatttcagaacacgtatcaatcgcttccgtctgtcctgatcgatgggtcttttgtaaaagggacggaccagaaagtatatcagcttgaccgaaataaaaggaagcctgtaaacgagcgctggcacacgttatatgaagggcgaaccgtcgtcattccggatccgtttttatttcaatatgaggaagagaactccgtcagtattccgaattttcagctcgtcagggatcagtttcatgtttattttatagaagacggggagaaaaggctggttgatcatagcgcatttcgcttttaccgatttaaacggcatgacatcccggctttagaacgggacgaaatacaagcgcttccggacggtccgccgatcagccgggggacatcgggctgtattcaacatctgcccgggagaatgctgtttcgcattgaacgggaattttatgtttatttgagaggggttctccatccgatcagtcatgacgtagcgaaacgcttttttgcgaatcagaaggcgatacccatttcctttcagcaaattaaacaattaccaattggaatgccgttctatccggtgtacgatgaaattatgagaaatctcaatataacaaaaggttgagagatgcagttggatgtgtaaggaaaaggagagcttttatgaccgatcaatttgataaaaccgagaagcagtatatagagcttacttccggcattcagaggttcgagcatttcagtgtatatacggacccttttttgccgcagattttttcgcataactttgttcagctgcaccggacatttccgttagacaaactcctgccgtttttttcgtccgttccgggcatgcttcaagccaattatattcatgtgaaagcggctccggagcacgcgtttccgcttcttctgaaacaaactcttgtaaagcagggctgcgtagtggaagatgagctgttttttgcaaggaaactggaaaatggggatctgcaggccggacacccgctcactgcttgggggacggaaaaaagcctcgccgacgggtcgtctattatgaacatctatgatgccctttacattggcgaggcggcggccgaacaaaagcttgagcggaaatatcctttgtataaggacggaacggttatgcttgtcgtgtgctacagcgacgcctcgcaaacgattccgatcggctgcggagagcttttcatcaacaaagcagataaaaccgcaaaaatagaagaagtcgcaattctggatcaattccaacgaaaaggctacggatcgatattgatgaatgagctgatggcggcggcaaagctgaacggcatggaaactgtataccttgtgacgtccgggatggacggtgtaaaccgcttttatgaaaaactcggcttcaatagatttcggcgcgtgcatacaatttttcattattttcttacatagttgggcattcgcataaaccaattgggagttggcccgcatacaatgccgtatatcgtaagaagaaaggatgatttgcgtatgtacggatatggctacggttgcggcagttttggctatggttacgggcacggcggctgcggaggcggaaccagcacttttgtgctgattgtggtattgtttattttattaatcatcgtcggtgcggcttttatttgttagactgaaaaaaatcctataatgaaaatcagcctgcagagaacctcactttctgcaggctttttgttatttccatgctgaaaaagtcagcttgaaaaacattttaatacatattaccttctggaaaagggggcgaaaatgtgaacataacgattgaagaattacctgaatcaagaattgcttatttccgaaacatcggagagtatggcggaaagcaaaacaaagaactgatggagtcatttaaaaactgggcgcaattgaatggtctgcttgatcattctgtcattttaggaattccgcaagaccatccgaatcgtactcctaaagagaaatgccgctatgatgtttgtcttgttatcaatcaagaccatgtgcctgaaccagcccggatcggtacattttccggagggaagtacgctgtcttcttgcttgatcacacaaaagaggcagtcagtggattttggaatactgttttttctgagatcgaaaaaaataatttatcaatcagagaacagcccattatcgaaaggtatactttacaaaaggtgaatcatcatttgtgtgaaataatgattcccatacagtaaagaagacgggaattttccgccttctgcttatactgattcagatcaaaaatgatgtgatgatgagctgagcaaagaataaaatcaacaataggaatagaatttccagaacgctcttcaggctgtcgggacatctccggcagcctgttttacagaaaggtattttctgcaaaaaactttctgaaggataagaatgcggttattcatctgttcatacaatgaagcaaatgggtttttgaggtggaaagatatggggagctatttaatcaaaccggagcttgacgggaattatccgtcagtcagtcatggaaagggatcatatgtgtatgatcaggaggggaacaagtatcttgacggagcatcgggggcggtcacttgcaatatcggccacggcacggaggatattatacaagctttaaaagagcagcttgattccgtttcgtttgtgtaccgctcgcaattcaccagtactccggcagaagaactggctttatttctggccgatcatctgccgggcgggctgaattggtcattttttgtaaacagcggctcagaggcagtcgaaacagcgatgaaaatggccgttcaatattggcaggaaaaagggcaataccaaaaatccgtcttcctatcaagatggggcagttaccacggcattactttgggagcgctttcattatcggggttctacgaacggagatatcgcttcacccagctgctcgaacggtttccggccgtttcagcacctaatatgtatcgttctgagctgcagggagaggaatttgtgaaagctgcggcggctgaactggaaacggctgttcaacggatcggttcctcatttatcgcgggatttgtcgcagaaccgattgtcggagcagccggggcggccatcactccgccggcaggttattatgaagcgcttgaggaggtctgccgccggcacggtattttgtttatcgcggatgaagtcatgacggggctcgggagaacagggcggatgcttgcttctgagcattgggggatcgcacctgatatcgcggtgctcggaaaagggttaggcgccggttacgctccgatagcggcagccgttgcgtctgatgacatcattgaaacgatcaagcggggctccggggtcattatgagcggacatacgtacagtgccaacccatactgtgcaagagcggcgcttgaagtgcttcgctatgttaagaaacacgagctgctccggcagtcagaggaaaaaggcgtaatgctgaagcggaaattagaagaaatcaaagagcgcagcggggtgatcggggatgtccgcggtaaaggcctcctgatcggggttgaattcgttaaggataaaacgacgaaggacattttttcgaaaaaacagggcttcaccgaaaaaatcattaaagcggcaaaaaaacggggcctgcttatctaccctgcaaagcccggcattgacagcggagaaggagacgccgtcatcattgccccgccgttcacgatttcatatgccgagctggatgagctgtcagatctattttcccaggccgcagaagaagttgaaaaaatgatgaagaaggattgagctgatatgtctatttttcataaaaaaatcgatattcatgaagcaattgccgatgtcaaggacgaatctgtcattatgttcggcggttttgggggagtgggttcacctccgtcattaattgaagcgattttggaaagcggcgttaaagagctgaccgtcatctgcaatgatgccggatttccggaaatcggcatcggcccgcttatcgttcataagcgggtgaaaaggctgatcgcttcccatatcggctcaaatcctgtcgcgggcagacaaatgactgacggagcgcttgaggtggaattttcgccgcaagggacgcttgctgaacggattcgcgcaggcggagcggggctaggcggtattttaactgatatcggcattgataacgcaactgtttgtgaaaacaaagaaaccgtaacgattgacggaaagtcctatttagttgaaaaagcgctgacggctgatttcgcttttgtgtccgcacatactgctgatgaattcgggaatctgacgtttgacaaaacggcgcgcaacatgaaccctctgatggctgcggcggccgaaagaacatttgctgaggcggcagagattgtgcctgccggcgaacttgacagcgagcatattgtaacgccgggcgttttcgtggagggtgtcgtgcaaagtgaaggagtgaagtggaaatgggcttgggaatagcggaaagagagagtatcgcgaggcgggccgccagtgaaattacctcaggtatgattgtcaacctggggatcggcattccttctttagtgccgaactttctgccggccggcatggaggtaatgctgcaggcggaaaacggcgtccttgggatcggcggcagtccggagcgcggagaggaggatgagcttttatgcaatgcggccgggtttcctgtcagtacagttaagggtgcttcctattttgattcagctctgtcttttgccatgatcagaaaagggctgatagatattaccattttaggcgcgctccaagtcagcaggacaggtgatctcgccaattggctcgtgccggggaaaaaagtgcccggaatgggcggggcgatggagcttgcccaaggcgcgaaaaaagtggttgtcgtcatgagccacaccgatcagaaaggccggccgaagctggtcgaaagctgttcattgccgcttacagcagcgggctgtgcagatctcatcattacagagaaagccgtcatcagcatagatgatggggcttttgttcttgaggaactgctgaatggcacgaccatagacgatgtcattcaaacaacggatgccgaaatcagattgggagaatgttttcttaaaagggggtctgtccatggatcaattagaaaagaaagtcactgagtgggcggaagaaaacacagcaaaagcggtaagcctgctgaaacggctgatcggggaaaaaagcacattcggccatgaatttaacgcacaggcagtcgttttagaaaaactgagacagttcgacatggatattgatgtatgggagccgagtgtcaaacatttgaaagagcatgcttattttgtatcggaacgtgaagacttccatgaaagcccgaatatcacagccgtaaagaaaggggccgggggcggaagatcactgatactgaacggacatattgatgttgtcccggaaggaaatcccgccgcatggacgtatgaaccgtttaacgctgttgaaaaggacggcaaagtttacggccgcggttcaacggatatgaaaggcggcaatacagccctcttgtttgcgttagaagcgcttgaagcctgcgggattacattaaaaggagatgttctgtttcaaagtgtcgtagatgaagagtgcggcggcgcgggaacactggcggctgttatgaggggctacaaggctgacggggcgcttattcccgaaccgactaatttaaagctgtttgttaagcagcaagggtctatgtggttccgcattacggtaaggggattgtccgcacacggcggcacccgctatgaaggggtgagcgccattgaaaaaagcctgcatgtcatcacagccattaaagagcttgaacacgtccgcaacgcccgtatcacagacccgctttatcgggacgttcccattccggttcccattaatatcggcatcgtccaagggggaacgtggccatcatcggtagctgaccgtgtggtgatagaaggcaggtgcggaatagctccggatgaaacgcccgaagcagtaaaagaagagctggcaagctggctgaaagatttggagtaccgggatgaatggtttaaacaccacccggcggaaatagaatggtttggggctcagtggcttccgaatgatctcccggatgagcatccgctgatttccgctctggaatcttcttttgagaaaatgaaaggggcaaaaccggttcgagaagcgtccccgtggggaacggacggagggcttttgcagcacgcgggacagacgccggtcatcgtcttcggtcctggagaagtcaaggcggcgcatcaggcgaatgaatacattgaaatccgggcgttaatcgatgccgtcaaaatcatttctctttttatcatggaatggtgcggggtggcagatgggggtgatggagctgataaaggaactgagggctgaaaagggagcggccgagattgatgcagaccgtttcaatgagcggctcagagtcattcgttatgacgggcagattacggcgcttattccggccgttttggcagaagcaaagcaagaaggagcccaaaaggtaattttctttgccaagcgcggcgatgagccggaatttgtcaagcatctttttattgttgagggtgtcatagacgggtattacaacgggcatgaggctgttgtgatggtgcgctatttagcagaggaacggagacggtcagattcatatgtatcagaagattcgactgttgaccgtttatatgagacaccgcggcggggactgactcagacagagagcacgctgatgttcagaaaagcggacgaagatgatgcagaccgtttaacgcacttatataaacatgtttttcttacctatccgactcctgtctttaatcccctatatattaaaaaaacaatgagagaaaacaccatctattatgccgcattcgatcaggatcgtctcattggggcggcaagcgcagatatcaatccggtattggggcacgctgaaatgaccgattgcgcggttctgtcagattacagggggaactccgtaacagcatacttgtttaaagcgttggagcaggagctcgcgggccggggaatcatccatcttttttccttggcccgtgcagcgtcttacgggatgaatgccgttttgtaccatgcgggatacggctacagaggcaggcttgtgaacaactgccgcatttcagaagggctcgaaaatatgaatatatggtgtaagactttacgtttggccattcataaggaggaattcgtttgacaaacaaatggtttcagccgaaacgtcattggaaggagattgaattgtggaaagatgtaccggaagacaagtggaatgattggctgtggcagctcacccatactgtaagaaccgtcgatgacctgaaaaaagtcattcatttgaccgaagaggaagaagagggcgtcaggatgtctgtaaagaccattcccctgaacattacgccttattatgcttctttaatggatcccgataacccgagatgtccgatccgcatgcagtccgtgccgctgtcagaagaaatgcacaaaacgaaatatgaccttgaagatccgctgtttgaagatgaagattcaccggttcccggtcttacgcaccgctatcccgaccgcgttctttttctggtgacaaatcaatgctcgatgtattgccgatattgcaccagaaggcgtttttccggacagatcggaatgggggtgccgaaaaaacagcttgatgcggccatcgcttatatccgggagacgccggaaatccgtgactgcctgatttccggcggagacgggcttttaatcaacgatcagatactggaatatattttgaaaaacctgcgcgacattccccaccttgaaattatccggatcggaacgagagcgcccgtcgtatttccgcagcggataacggataacctttgtcagattttgaaaaaatatcatccggtctggctgaacactcattttaatacgagcatcgaactgacggaagaatcggttgcggcgtgtgaaaagctcgttaacgcaggtgttccggtcggaaaccaagccgttattttagcagggattaacgattcggtgccgattatgaaaaaactcatgcatgatttagtgaaaatccgcgtgcgtccgtattatatttatcaatgtgatttgtcagagggaatcggccatttcagagcgcctgtgtcaaaagggctggaaatcattgaaggactgaggggccacacaacgggctttgccgtgccgacctttgtcgtcgacgccccgggcggaggcggtaaaatcgccctgcagccgaactacttgctctcccaaagtccggagaaagttgtgatcagaaacttcgaaggggtgattacatcttatcccgagccggaaaactatatcccgaatcaagccgacgactattttgaatctgtttttccgggaacgatggccaaacacgagccggtcggactgagcgccattttcgcggacaaagaggtttcgttcacaccggaaaatgtatcgaggatcgacagaaggaaaacgtttacatcaaaccctgatcatgaaacgctgaaagaccgcagggaaaagagagatgaattgaaagaaaagaaatttattgcacagcaaaagaaagagcaaaaagcaggatcggaagtcggaggtgagtcgccgtgaagccatgcgagtggtgcggcaatcagaaggcgtcagctagtcaggcggctgtgtactgggagcttcctgacggtacgagggccatagaaattacagaaacacccgcattcgcctgttcctcctgcggcatgacttatcaggaggaagcggtcatagcggaaatcgaaaatcagctttttttagtcgatgcaaaaaaattaccggaaacactcacatatcaagagctgatggagacagaacggatcttgaaacgaaattattttgacttctcctagtcttcttttgttgtaatttcacacttgaattgtataatagtacaacaaaagacagtcatcaggaggggaaacccatgaaatccttttatcactatttgatgaaatacaggcatcccaagccgcaggacgcaatcagccagtttgcgaatcaggcatacgaagatcacggctttccgaaaacgtcaagcgattatcacgagctcagttcttatttagaactgagcgccgactatttagaaacgatggcgacatttgatgaagcttgggaaaaatatgagaccgaggtgcatcacgcctgaagaaaaaccgcacattgtgcggtttttttctgttgaaatcactcgcttatgaggtgccgtatgatcaaattccgcaacgccgtccgttttgatcagcacgtaaacaaatcttcctgacggcacgtatcataaggcagtagaatgtatagctgcagagttcaccggatcagcctgctgccggcgggtcccgtgtaaggagagcctcttttcacggagaaataatcaaacatttaaatgaagtgaggggaatcaaatgatccattaggtaagactgatgaggcaatgacgtttggaaaaggggattttatgtgacaaggttgaagcggattgaagttgtggcttcattgaaagccgagtgccttcgggccgggtattttcctttgcgtcatagagaaaaaacaaaaactcataaaaaatagaagctttttgtctcagtattgttactgctcagtcgatcgagagcggaatgtcatcagacgcttctgttacggtaagtgaaaaaacgcacaagcatattgcggtttttgacattttgaacaggtgcagaaatagatatttcctgtggttttcatgcccatgcgaaattatggcggccggcatacgatagcgtatgacagtccgcggcaagggggagacagcatgaagccagataaaccgaaatttcaagtgggagacatcgtggtcgtcgtgatgtacggaaccgtcggcaccattacgaaggttcatcaaattgataaacattatctttacgaagtcaatcataatgaagtgctttattttgaatcgtccatccagctttataaagattatgagggcgtgatcgtcgatatggagaaattggatattgaatatgaatttctgatcggcgacgtcgtatatgtaaaggactacggaaaggaattattccgtgtcatcggccacagaactgaaatatggagatatttagaggatggctgggaggatattatttatgagctgactcggctgaaagacggagagtggcttgaaacggaggaagaggatctcacgctggttctgagaaaatatgaaatggatcagtttgtgcatcagctgctgtttgtccactatgttggggaagcatctcatgagatcggcgaggacaccgtcgcgtctgctcttcttcagtttgaaggcgatgctgatgatcccgatgccctgcatgtgctggcggtatcgattgtagatgagctgcttgatatttataacgattataagattctttatcatttgttcggtgacgaagaatataaagatatgatgaattttgtgctggaaagcctgcgggagcatttcagctagccggcaaaaaaacggacggtgacatataaaaaccagggcagacagccggcaaagattacaaacgacattcctttcagcactttttccaatacgatatcaaatccatctccgtccaataaagccatcattttcgtcatcatcttttctccctccggggcttgttttttaaaagtatatgagcggacaaaacgtttagaactttcgggtataatttgaacggttttttcataaaacataaaaaaggaggcggtgtttgcatgaaagaaatagatcttgtgattgacacagaagaaatagctgattatttttacagtcagcttgctatgcgcgggtacataccgagtgaagaggaaatcttcgaaatagccgacatcacctttgattatttattagaaaaatgtatgatagacgaagagcttgatgaagactgaaactgcggaaccgaagtgaaaaagcttcggttttttcaatcagctcgggagaatgaaacatggggggaaaacgttgtacaagccagcaagtcttttcgcattgtttattctgctcgcagcagcgatccggatagaagccgtccgggtttttgatgagcgtgtgatagaagcggctgtcaggatcagggctgcctggctgaatgaattgatgttatggataacggagctcggcacgaccgcggtgcttttgccgcttcttcttttgacaggcgcggctctgtatatgtacaaaaaaacgccggatgttgtttttttgccgcttctctttctcattgaacggattgtaaacataaaaataaaagaattgattgaaagagccagacccgcttttgaaccgctcgtccatgaaacctcatacagttttccgagcggccactccatgaattcggcagtggtgtatcccgtcatcgcttactttttgatcaagcatgttccgtttttcacgaaaagaaagcggaccgtcaccgtctttaccggagttctcgtcattctgatcggactcagcagaatttatttgggcgcgcattttccgacggatgtccttgccggattcagtctcggactttgcctcgtttcgctttttgcgctctttgacgaaaagtatcatccgtttcgacaaaaatagagacaggagaaatgagaaaaaacgctaatactattaagaaataagagggagggatcttgatgctgttatcgctgcccgtgtttaaaaaaaagacttgtgcctatgatgtgacgatttttcaaacaccccgctacggcgagaaaaagggatacagggtcgtctatcggacagagttggccgctgacaatcatcaagacgcactggaaagggcattttctgtttttaatgtgcctgatacggtcccaaacgactatcaagccagattcatagcgaccggagatgtcatactcatagacgaaggaagaaaaggaaagacctattacaggcttaaccctgcgggatggagcaaaattaaccggctgctcgtccagccgaggtaagacggggccggctgaatcttcagccggcttccgtattgtctgggaaagacagtgttaaggcttccgtttagcggcggaatgctcttttccatgcgcttcatcagctgcaatgacgtctgaaacgggcacgtgattgttctttttctggccggtcacccggttgcgctgttttttgcccattatgttcactcctttttctttaggcttgtcatcccgcatattctgcccaagatcgccctgatcatgctgatgattgtctcttaccgttattcagtgtacaatgggtgggagtttgaataggcaggaggaaaaggaaatgagtgtacatatacacgcagaaaaaggccaaattgcggatacagtgcttttgccgggagacccgctccgagcgaaatttattgcggaaacttatcttgaaaatgtggaatgctataatgaagtcagaggaatgtacgggtttacgggtacatataacggcaaaaaagtatcagtccaaggcacaggcatgggtgttccgtctatctctatttatgtgaatgaactgattcaaagctatgatgttcaaaacttaatcagagtcggctcatgcggagccatccgtaatgacgtgaaggtgcgtgacgtgattttggctatgacgtcttcaacggattcacagatgaaccgtgtcgccttcggcagtgtagattatgctccttgcgcagacttcgaactgcttcataaagcgtaccaggaagcgcaaaaaaacaatcttcccgtagcggtcggaagcgtattcaccgccgatcagttttacaatgaagactcccaaatcgaaaagcttgccagatacggcgttctcggcgtagagatggaaacgactgctttatatacgcttgccgctaaatacggcaaaaaagcgctgtctatcctgactgtaagcgatcacgtgttaaccggagaagaaacaacggcagaagagcgtcaaacgacttttcatgatatgattaaactggcgctgcatactgtatcgtaaacttgagatgagggttatgctgattaaagcagccctcttctttatgcatcgccctgattcaaaaaaagaaaggtaagtgtaaaatgaagaaatccactaaatggttttcgctcgctgccgctctcagcgtaaccgcaatcgtgggaaccggctgcagcatttcaggcggcgacagccacaaggacacaaaaacagcagctgaaacaaaacaatcagatgacacatcaagcaaaaaaacaacgaaggcagaaaacagcgattttgtattggagagcaaatattttaatgatattaaagaagtgaacgggcttgagaccattcaaaacccgacaaatacccttgcgctcgtgaataagacatacacgctgccgggagattataaaccgaatgatctcgtgatcccgaaagtcgaattttcttttactgagaaaatcgagaaacgatatatccgcaaacctgccgccgatgctttggcggaactattcagcgccgggaaaaaagaaggttatgacctggttgccgtttcaggataccgttcttatgacagacagaaagttattttcgataatgaagtcagtctgaaaggtgaaaaaaaggcgaaagaagccgtcgcatacccagggcaaagcgaacaccagacggggctggccatggacatttccagcaaaagcaacggatatgagctgaatgaagcgttcggaaacacggcagacggcaaatgggtgaaagaccatgcgtatgaatacggctttatcatccgctatcctaaaggcaaagaaaatgtcacaaagtatgagtatgaaccatggcatttacgctatgtaggcaaaaaagcggcaaaagccatccatgaccatcaattaacgcttgaagaatattttaatgaagtaaagaaagtgtaataagaagaagcccgcttgaaaaatagaaagcgggctttctttattaccagaagagtaaacctccaagcgcaaatccggtaatcaaaccaaggccgataccgtaggctgctccccagcctccccagcctccccaatagccgaacccgtatcctctgtgacggccgccgacaggggcgatatacactttgctgttagtcacccgtacgattcttccgacgtggactctgccgtttcgttctgtaattcttgctacttttccctggtgctgccggcaaagatgataatagttttgcatcttttctcctcctatccaacctatctttctatgtcagcttatgatagagtgcggtaaaaaggttggacgaaaacaggaggacaatcgccgttttacttgtaagcgacaaaagcgcagtgtcccatatattcacggtacgtctgcataagctcgtaatgagccgtcagcgtatcgtagtgaaccggctgaataacgggcgataaatccatttctgtagtcggctcctgcgcattgttttcatagacagcgggaatgaaatccgctttctgaaagccttgctgaagcaatctctgtttccatgccgtttcatcctgcaatacggtaaaaccgtagaagtcttttatctgcgtgatggcgttttccggcatgggcttttgtaaagcagcttcaatgccgatcagcatacccccgggtttaaggacccgcaggatttcagacagcgatgaatcaagatttgaaaaggtgagaactgattcggaaagaacggcggaaaattgattttcagcaaacggaagccgctcaagctccgccaaatagcccggaatggttaagccttcagcggcaaatcgttttgctgctttttcaagcataaggggatccttatcaacacaggtgacggggtacagcaggtggccgagataagcggccgtctgtcccgttccgcagccggcgtcaagaatcggttcgccaggaggaggagccgcttttgtgagaacggctttggaaaaagcgagcccgccggggtgagcccctccgactccgaataaggacagcatttctaaatatttgctcaaaggccgaatcctccttttttcctcagcatatgttgagagaaaagcataggtttgggtaaacgggaaagaagggcgcctcacgtttgaagttgacgaatgagcgttcgtctatgataataatgtaagaataaaaaggtggtgttttcttgaagcggcaatttaaactgttttttattatattgatcactgcggtcgcagcctcggcgcttacgctgtttatcacgggcaatacgaccattttcggacaaggctcggctgctttgacgaacagcaaatttgagaaattcaataaagcctacgagcagattaaaagtgattactatcaaaaaacagatgacagcaaattagtagacggagcgataaaaggcatgatcagttccctggatgatccatattcttcttatatggacccgcaggaaggaaagtcttttgaagaaacaatttccgcttcgtttgaaggcatcggcgcacaagtggaagaaaaggacggaagcatcctgatcgtatcgccgattaaagggtcacccgcagaaaaagcgggggttaaaccgaatgaccagatcttgaaggtcaacggcaaaagcgttaaaggccttaatgtaaacgaagccgtcgcattaatccgcggcaaaaagggaacaaacgtcaagcttgtgctgcacagagcgggtgtcggcgatctgaacctgtcgatcaaacgtgacacaatcccggttgaaacggtgtactctgaaatgaaaaaaggagacatcggcgaaattcaaatcacatccttctccgaatcgacggcaaaagagctgaattcagccattgacagcctcgaaaaacaaggagcgaaaggatacattctcgatttaaggggcaacccgggcggactgatggatgaagccatcaaaatgagcaacatgtttatcgataaagggaaaaatatcatgcaggtcgaatacaaagacggcacgaaagaggtcatgaaagcgacgaaagagcgcaaagtgacaaaaccgacagtcgtcctcgtcaatgacggcaccgcgagcgccgcggaaatcatgtcggctgcgctgcatgaatcatcgggcattccgctgatcggcgaaaaaacgttcggaaaaggaaccgtgcagacggcaaaagattacagcgacggttctaccgttaaactgacaatcgctaaatggctgacagcggacggagagtggattcataaaaaaggcatcaaaccgcaatatcaggttaagcttcctgaatatgcgaacctgccgtatttagatgcgaaaaaaacatacaaatacggggattccggaaccaccgtcaccaatgcgcaaaaaatgctgaaagcgctgggatacagcgtgaaagtaaacggcacgtatgataaagcatttgaacaagccgttaaacaattccaagcaaaagagaaactgaaacaaacaggcattgtaacgggagacacaacggcaaaattgatgacggatctgcaaaaacagcttgcggacaacgatacacaaatgaaaaaagccgttgaaacattaaataagaatatgaaatagtaaaaaacacccgatgcgccgctcgcgcattgggtgttttctgtttgcgaaaagcccgtcttatgtcgtttcctgttcaaaaaggtggctgttcgcctgaatgaaaaactgtgattgctcatagtgataggtgacttttgagtagtcaaacggctggccgttggttaaatgaaaaatcgtttcaacgcaaagcttaggcgctcctgtaaacagacctaagtactccgcttcttcttcatttaacatccccgcgtacagatataaatctgaaaaaccgcgctttaacccgagaccttctctaatataatcaaatattgattctgccacgatctctttattcaaatacgtaataatcgatttgttgtaaaatgactcttcgatacacaatgtcagcccgtcaatatatcggattcgcttgacataatacacgtcgccgtcaggcggcatattcagattttgggcagcctcaggcgtgggttttctcacttccagcgctaataatttagaagtgacattaaaatcttcaagtgattctttaaatccctgattagaaagcagactgatatacccttttcttttattccgtctgacaaaaatgccgcttcccctcacttgaaacacaatcccctttttttctaataaatctaaggacttggtgatcgtgcttttgctcacgttaaaccgggtcattaaggtttgcagcacaggcagtttatccccctgctgcagctgatgttcttctatgtatttttcaatatctatcgcgatttgctggtattttaacatatacattcctcattcatttattgtcccgcttctttcagaattatagcataatcgtttttaaaagccatttcgtaaattaactaagattgtttatgtattgataaattataccggtacaattataatataaacgtataatatgaaaataaaggcaggatttcttctacacttgcgaagcggatgcttgaagcggctgcagtgcatttattcggcatgcaagcggcagtcaaataaaggaggatataaacgatggggacattgccaaaagattttttatggggaggcgctctggcagcccaccaatttgaagggggatggaataaaggcggcaaggggccgagtgtagtggacgtcatgacggcaggcgcgcatggtgtgccccggaaaataacagatacaattgaagagcgggaattttatccgaatcatgaagcgatcgatttttatcatcgttataaagaagacatcgcattattcagcgagctgggtctgaaatgtttaagaacgtccatcggctggagcagaatttttcctaaaggtgatgaagccgagcccaatgaggaaggattggctttttacgaccgggtgtttgatgaattgctgaaacatgggattgaaccggtaatcacgctgtcacattttgagatgccgctccatttggcgagggaatacggcggtttcagaaacagaaaaacagtcggattttttgtgaaattcgctgaagtgtgttttgaacgctataaacataaggtgaagtattggatgacgtttaacgaaatcaataataagatggatgtgaataatccgatctttttatggacgaactcgggcgtcgccgtcaaagaaaacgaaaacgcaaaagaagtcatgtatcaggccggccatcatgaactgctggcaagcgcattggctgtttcgaagggaaggaaaatcaatcccgagttcaggatcggcgcgatggtatctcatgtgccgatttacccgtactcatctcaccccgatgatgtgatgctggctgaagaaacgatgagacagcgttttttcttcccggacgtgcaggttcgcggatattatccaagctatgcgttaaaagaatttgaaagagaaggctatcagatacactttgaagacggtgatgaagagattttgaaaaacggccgagtggactacctcggattcagctattacatgtctacaaccgtacaaagtgatgtatcaaacgataataccggggatgtcgtaaacggaggattgccaaacggcgtggacaatccttatattacagcgagtgattggggctgggcgattgacccgaccggtttacggtacacattaaaccgcttatacgaccgctatcagattccattatttatcgtggaaaacggattcggtgccatcgacacattagaagaggacggttcaattcatgacacagcaagaattgaatatttatcgtcacatataaaagctttgaaaaaagcaatcacatatgatggtgtggatgtaatgggctatacaccatggggaattattgatatcgtgtcatttacaaccggagaaatgaaaaaacgctacggcatgatttatgttgatcgggataatgaaggcaacggttcaatgaggcggcttaagaaagactcatttgaatggtataaaaaagtgattgaaacaaacggttcatatgtatcctaaaggtgtaaaaagggaaggcttcaccgtcgtgtgaagcctgctttttatcagtaattttgaaagcgcattcatttaagcgggaaggaggtgactgtccggcttttcatttagaatcgcttataaataaggaaagggatggtggttcatgttttttaaaaaaggtctgcacatgacgctggtttttcttatgtttttctttttcatatcaagcagcatggaaaccgaagtgtatgcggctgatcggaaggcttcagacaaaaacaaagtaagggtgtggttcagttctgaaaaagatccggcttcccgtacgtggtatgacgggccgctggaagtgaaatacgccttagacgaacaaacaccgcttacattgacaaaaaagaaggcttctgactccgccgctgtgtatattgatccgtcgcgccgctatcaaagtgtgttaggcgtaggatcgtccctggaagaatccacaatccataatttatcaaaaatgacacccgcaaaaagaaaagaagtgctgaaaaaactggttgatcccaaagatggtatcggaatggacgttatgcgcataacgatcgggacatctgattttacggcacaggaattttatacgtatgatgatatgcctgaaggccaaacagatcctaagctccgtcatttctcgatccaaaaggatattgatttacacattacagcaaccatcaaggaagcgctggcgataaatccggaactgaaaatcattgcctcgccgtggagcccgccggcttggatgaaaacgaatgaaaacctcaagcggggaaagctgaaagataaatatatcggcgcactggccgtttacttccgcaaatttattgaggcgtacgaaaagcagggaattccgatttatgccatgacccttcaaaatgaacctttgctggaaatcgactatccgagcatgtatatgccgccgtctcagcagcgcaaactggcactggccttaaaaaaagaaatgaaaaaacacgtaattgacacgaaaatttggatttatgatcacaatgcgagcggggcgtggaactatattccgccgattttagatgataaaaaaggaaaccgggcggcagacggcatcgcttttcacgattatgacggtgacctttccgtcatgtcggaaatcggaaagagatatcctgatcaatctattcacttaacggagcggtctgtctgggggacggcaggggcggaccggatcgcgcagtatttccgcaacggcgcgtcgagctacaatgcgtgggtgacgatgctcgacagtcaaatcaagacgcatcattggataggcaccccggacccgacgctgtttattcaggatgctaaaaaccctgaccgctattggaatatcccgatctttcatatgacaggaaacttttcaaaatttatcgaccggggagcaaagcggatagaaagtaattacggctccaaaaacacagtctcgaatgtatcgttccttaatcctgatcaatccattgtgacagtcgtaatcaaccagacatccgccgatcaaaaattccatgtcgtttcagaaaatcggcagtttgaagctgtcatcccggctaaaactgtggctacctacaaatggaggtggaaaaagtaaaataccggcacatttacgtgccggcttctttctgttaagcgcctttttggttcagttgatcagacggcgctttattgaataaaccgtctttgacggcgtttgaagccgcattttttacaaaaaacgggttaaggataataacggctgccatgttagcggtcaaaccccaaaagccttcatatataccgtgggcggattgggtgatatttaccgtgaatgtcacgataagaccgacgagaagaccgataattgtcgcttctttcgtttgattcttccaaaacagactgacggcgatagccggaaagatctgaaccatgccggaaacaccgagaagctgaagggtaacgagcgcagtcgggaacagcatgccgaataaaagcgcgagcccgatgacgacaaataccattgaacgggtgatcatcgtcagcttgcttggtgacacattcgggtgaatcaaatcccgatataagttattcgcaaataagtttgatgctccgatggccatgatagagcagggaatcaatgacgcaagggcaatcgtggagtaagcaaagccctgcgcgactccgccgtaagacgtttgaatcagcttcaataaagcgagccgcggattggtatcttccggcaggacaagaaacgcgataaagccgagaaaaataacaagaatcaaaacaatattataaagcggcagaaacatgctgtttttgcggacggcatctgcgctttttgccgtaaatacgccggttgccgcatgcgcccacataaagagcgccagcgcagatacgatggaagctgtgataaaccaaggaattcctttcggccccgagtccgggatcgtcagcatttgcggcgctttttcagccagagtgtgaatcatcggcgtccagccgtgaaaatggatcagcgggagtgagacgaccataaacagcataatcacccacaccagaatgtctttaataatcgccgtaaaggtcggcccttttattccgctgaaaaaagtatacagcgctacaagaataaaagagatgatgacgaccatattgacattaatgacacccgttccggccacctgaagcgtatcttgaattccgctcagctggagacaaatataaggaataagcataagaacgccgacaatggcgacaagactggccaaaagtttactgtcaaagcgctcacgggcataatcggcaagcgtcgttaatttgtgtatttttgccactttccacagcttcggcagaaagaaataagcgataaaatacgccaaaacagaatacgggattgcaaaaaaagcaacgcttccccctgtgtaggctgtgcttgttaagcctaaaaacgtataagccgtataaagatccgcgccgactaaaaaccagacgaggagccccccgaaccgtctgccgccgacagaccattcctcaacagaagtgcgtgatgatttgtctctcccggctataaagccgatgcagacaacggttaaaacgattatggctgtaatgatcaatgctgttatatttgcgggcatcagtccagtcctccttgtttcttctgcagcctatagataagaaacgaacataatggagtgactgcgatccataaaagcagccagaaatgaaaaaaaggcagcccgataatgatcggatgaacccgattagcggctgacagcagggccagctggctgaaagggattaagatgagaacgaaaattagtgcttttctgaccatttactttcctcctgaaacttgataatgctccttatcatagcaggtgtcagataagatcacaagatatttttcagaaaaaaaagaattctattacttttttaactgaaacactttagttgcatcttcattcatattaaattagaatagttaatatctcgaaatcaagatatttaggagtgaatacgttggatacacaaggattgcaccatgttaccgcatttgcaaaagatcctgctgaaaatctacggttttatactgaagtgctgggtttgcggctcgttaaaaaaaccgttaattttgacgacccggccacttatcacttttatttcggcaaccaaaacggagagccgggcacgattattacattttttccttttcagggaagccgcccgggaaccgtgggaaaagggcaggccggaagaatttatttctccgtgccgaaaggagcactcgcgttttggaagcgccggcttgaagaaaacggcttgtctgtaaaagaacagatcatgctgtctgaacaagtgcttctctttaatgatacagaagacctgccgcttgccataatggaagatgaaagaagcggacagagtgaatggacgcctccgggcattaccgaaaaagaagcgatcacaggcatgagaggtgttcttctgtactcgtaccgtcctgaagcaaccattcaatttctcatagaacgcttcggttattcaaagacaggagaagaacatcagattgtcaggctgcaatcggaggcgcggatcggacatattatagatgttgaccttgcgccgaaagaaacaggtatcggcggttacgggacagttcatcatgtcgctttccgcactagcgaaaaagagcaggcgaaatggaaggatattcttgctgattctcatcttgcttcatctgacattcttgacaggtcttacttcacatcaatttatttcagggaaagcggcggcatattatttgaaatggcaaccgatgaaccgggctttatgacggatgaatcctttgaaaatctcggaacagagctgaagcttccggaatggctggaagagcatcgcagccagattacagctgttctgcccaaaatggagaaaggagaatgatgatgaaacatgtgtttgaacagggaacgtcagaaaatgttctgctgcttttgcacggaacgggaggaaatgaacatgatcttctgtcgctcggacgttttatcgatccgaacgcaagtctgctcggggtcagaggatcagtgtcggaaaacggcatgccccgtttttttaagcggctgaaagaaggcgtatttgacgagaaagatttaattgaacggacggaagaattaaagaattttattgatgaagcggcgcaaatgtacggattcagcagagaaaacgtgattgctgccggctattcaaacggcgccaatattgcagcaagtcttttgtttcattataaagatgtactgaaaggagctgttctgcatcatccgatggtgccgatacgcggagtgaagctgcctgatatgaaagggctgcctgtgtttatcggtgcgggaaaactcgatcccctatgcacaaaagaagaatcggaggagctttatcagtatctgacagatgctcatgcatccgtcgctcttgaatggcaggagggcggtcatcagctcacacagcaggaagcagagcaggcacgaacctggtacagtgagcgattcctataaaaaacccttagtctgcttaagcggactaagggtttctttcatcttacagccaagttgacactttagatacaggcagccggttgcttttatgtgccggcttaacggctttaccgattgaaatcagcatgacgggcacgaaacgctcgctcacgtcgaattccttaacgaattgctctttattgaatccgccgatcgcgcaagtgtcgtagccttttgctttagcggcaagcatcagctgcatcgctgctaaagaagcgtttaaaaatgctgaatcacgggcaaactgatcattttggtatgcaccgttaatctggcctaaaagcgtttgtttaatctcttctgtgatattgccttgctcagccagttcagcataaacgtcttcaccattttcatttgcttttaagtcgcctaatacggcaataactgctgatgaatcaataatctgtttttgattaaaagcaaccggaagcagggcagcttttgcttcatcactgtgaaagacttgaaaatgccaatgctgaaggttccaggcggaaggcgcttgcgtagtgatttcaaggagttctgttaattcctcttttgtaatgaccgcgtctttatcgtattctttaacagatgcgcgttcttttaaaacgtctaatacggatgtcatcatgtttcctccttcggataaacgtgttatcataatagaaaagttagaagcttactaaatgtaactcgaaaactaattttaatggatcacaaaaaacttgtcaattcatagatgaagggatgaactcacgtgggatatacaatgtgtcctaaaatggaatccgctttttcccttttgggaaagcgctggaacggcctcattatccatgtactgatggacgggccgaaacgatttaaagatatgaccgaaacgataccgacaatcagccagaaaatgctcgcggagcggctcaaagagctggaacaaaatgaaatcgtcgagcgtcaggtgctgcctgaaacacctgtcaaagtcatttataaactgactgataaaggcttggccctgcaagccgtttttcaggaaatgcaaaaatgggcagacagtttttgcgagcccgggggatctgccaacgacacatgtgatgaataacaaaggctgcccaaggcagccttttcttaatgataatgtttactcgtcataaaaaccattaatatcaaaattgttcagattgaggttcaagccttttaattgctttaataaagcatcgaatgtaaggaaatgatcatttttacattccgccggaacatcatttggagaaaatagtttcattcctccctcaatccactgtttccggtataactgaaatgctgcttcaattaaatgatcaggcgttacaataaaccctaagcttacgtcatggtcctcgctgtagccgaattcaaacccgcagcaggggcaaatatcaaatgttttttgatattcgccattataaacgggacttgtctctaatcctttaaatccgcatatcaaacaagggtacaactcactaaccaacatacatccctcttttattcagtttgcaatcattcagtacaagcggggaggccttttacagtttcccggttaaaaactgagcctcaccaagcccgaagctccaatcggcgttcccgttttctgtaatggaaatcatgacgtcctcgggtgatatgccgcattctgttttaagctgatcagccatcagttgatataacgtttctttttgatgttcggtgcgcgctttgctgacaatgctgatgatgacaagatctttgcttcttttgaaaccgagcccggtatcttcaatgataagctcatgaggccgatgctggtgaacgatctgataacggtccgttacagggacgtcaaaagctttaaccatggcgtaatgggcggtatccagtaatttttttaatgctgcgtcatcccggccttcaataacgtcaaaacgaagtaatggcatattttattccccctgatggttttatatcatgtcgcaacttgtaaaaaagtataacagttaatcaaaatgtaatcaaattataaccaaaatgtttatgcattaatgcaatatcagagagaggcacatgttgttacaatcgcccaatcaatttcctcattttatgaatacgcttaagaataggcagacataaaggaggaaaaacatgtaccctcgtcatgcattgtatcgcgggaatttcggtcctgccggatttccggcgagaagtccttttttgttcggcgctcctttattcggcggatttttaggcggtcttctcggaggcgtgattgccacaggttttacaagaccccgctatccgtacgggttcgccggttacggatacggaggcgtcccatacggcggtttcgggccgggagccggcggttatccgccattttattaaagaaaaaacggcctgcatcgcgcgggccgtttttttatcttaaaatctccacttccgatagattgtagtcttcctgttttgaaaacataacttcaatcatcccgtctttatagactgcttttgttccttttcgtttgacgaggctcggaaggacgatttctttttttccttctcccagactgctgttctctacaacgaggctgtgtgacgtatgcttaatcctgatacggtcgagttcctcttgttctgctggaattttcgcaaaaacatgatcggatgtttcaaacaggtcaatttccggcttgggcggttccgcttcgaccggctcggcatttttggacatgggatcgcgaaaagggaactgtccggcataaccggcgccgaatacgctttccatcactcggttgacatatgtctcgacatctttcggatcagcatttttaaacgtttctttagagaactgattttggaagggaaaatatttgttccaatcaaacacggcatctcaccctttcttaacggacaacatagtatatgcccgccggaagcttcccgtgatataatataatctgtttacagaaaggtaggggaaggccgtgcaagggaataacgcaagaaaaggaatcatttataccgcttgttctttcgccatgtgggggctgtttccggtctattggaaacttcttgaacaaatacccgcattggacattttagctcaccggattttatggtcatttgttttcatgtgtgtgcttttaactgtgcttaagaagtggaaaaccggatggcgtgaactgcgtcttttgaaatcggaagggggcctgctggcgctttttttcgcttccgttttaatttccgttaattggtttgtgtacatatgggccgtcaatcacggctttttgcttgaagcaagtctcgggtattacattaatccgctcgtttccgttcttttgggcatcctattcttaaaagaaaagcttaacaagatgcaaacagcagccgtttctattgccggggcggccgtgatcatatctgcgtttcaatatggcgcggttccttatatcgcattgctgcttgcattcagcttcggcctgtacggcttatgcaaaaaaagaacccgcatgtccagcacgatgggactgacgctggagacgcttttgattaccccggctgcacttatttatttaggatatacagctgacgggagcacttccgggtccttgggggcaggaacatgggcgctcctatttttcgcaggcgtatttacggccttgccgctgttgctgtttgcagagggggcaaagcgtctgccgctgtatcaagtcggcattttgcaatatatagcgccgactattacccttatgctcggcgtatttgtgtatcatgaaccgttttctgggcaaaaagcgtttaccttcatttgtatatgggcagcattgcttttgtttaccttttcacagataaaatggaagcggccgataaaaagccgctaagcctttcgctttccagcgatagcttaaattatgtataatcattacgagtatgtaaaggagctgtacaatgggcactgataaagacatagtaaaagcctatcaggcactgtggaataaccgcactctcccggcttcaacccttgaagaagcggagaaggcaattgatcttgaactgcttgatcaaagaacacatccgaggctccggaagacacccgaggaaaagtttgctctggcggtgcagcgaattgtagattcccggctgcggccgattgagaaatatgaattggttgaactacatacgaagcgtttgcaatttttaaaagaagaaagaggggagcagctatgaaagcgatcataaaagaagatgtgcaaacttctttagagcgatatgccgatcgtcctgtatatatccatttggaaacaacgaccggttcttattcagcgcatctgaatgagaaaaacatgacggttgtagcctatatacgcaatgcaaaagtgacgtaccatcaggcgaaaatcaaaggaaacggcccgtaccgcgtcggtttgaaaacagaagagggctggatttacgcagaaggtttgactgagtatacagtagatgacgaagaccgtctgttaatggcagggcatctgtcgggcggaaaattggcgatttcgcttcaaatcagcgaaaagccgtttacagtttaaagaaaagggtgaaaatcatgaaagaacatgtactcgtcatcctgcctcaccctgatgatgaatcatacggagtggcagggctgattgctttacacagacaaaaagatattcccgttacgtatgcatgcgcaacgcttggcgaaatgggccggaacatgggagatccttttttcgcgaaccgtgaaacactgccgctgttaagaaagcaagagctgattgacgcatgcaaagcaatggacgttactgacctgagaatgctcgggcttcgtgataaaacacttgaatttgaagatgacgagtggctcgcggatatgatggaagagattatcgacgatgtaaaaccgagtctgattgttacattctatccggagcacggcgtccatccggatcatgatgcatgcggcgaagcggttatcagagcgctttacagaaagaaaaaagaggaccgcccgcgcacgctttgcatggcaatcacccgcaacagggaggaagccgtcggcaagcctgatgtcattcttgatattaaagaggttgccgatattaaaatgaatgccttaaaagcgcaccgcacccaaacggaaggcatgctgagagagctggaagaaaaaataaaaaataacgagccggttcttcagacatggtttgaagaagaagtgtattggacatatccgtggaaagactgataaaaaaaaggataaggctgaaatgccttatccctttttttgtgtcagatcggaagcgatcgcttccgcaagcgaagaccgtattgataaatttgaaaaactcagtccgagctgcaccgcggtttgggcgatttcaggacggattccggataatgtcgctttcacgccgagcattccgagtgattcaattaaggtgaaaagctgttgggcaaccatcgtatcaatcatggctacgcccgataaatcaatgtacagctgcgtgatgcgcttctctgaacactggtgcagcgtattctccaaaatcattttggctcttgccgtgtcaatatccccgatcaacggcagcagtccgacattgtcaaaaagcacaattaccggcgagctcagctcggtgatcaattctttttgcgcttcaagctgaatgtttgtgtttttatacatttcctctatgaaaatatgaatcaccacatcaaacgatttaatcagcgtatggaatatatcttcggcatcttcttctgtcaaggtgtctgaatgaagtctggtaaactgcttgacatggccgacatacaaatcacgaactctgataaactcgcgaataatataatggatgggcgtttttaaatgttcttcatcccgtgcggcttcaaacgcccacttttccaatgccgctgtatatacttccttctcttcagaaaaaatccgattgagctgataattaaacgccagattttgttttttcagattcgtgagtacagccgggtcagtagaagcataaacagaatcaggatccgtatcatgaagggtatcaaaccatgtctgactgatgtcctccgcccgttcagttaaataatcgtacagcagtttatgttttggcattgctgctcctcctttatgaaatcatcatttttttcacataatgcttttgcagtttcatcagtctgaagaataaaccgacagctcctgcagcaagtcctgcaattaacccgatccaatagccgtatgccccgaggcccgtataagtgccgactgcgtaaccgaccggaagcccgataatccaatacgacacaaaagccgcgccgagtgtatagttgacatccttatatcctctcagagcgccttgtatcggagctgctacggcatcagaaagctggaaaaacagcgcatagattaaaaagtgctgcgtcaacatgagcaccgccggatctgatgtatacattccggcgatttgcggtctgaacagtaaaatgaaagccgccgtgcataaagaaaaactaagcgccatcacgatcccgatatagctgtatgagcgggcatctctatagcgatttgcgcctgcttcaaagccgaccaaaatggtcatggccatggatacgctgagcggcagcatatacaagagggaagcaaaattcattgccgcttggtgggctgcaatcgtcaccgtctgaaaatggctcataagcagtgtgacagccgcaaaaatgctcgtttcaaaaaatacggcaaaaccgataggcaaaccgattttcaaaagctttctgcattcagacggagaaaaacggtacagtttccgaaatacagagtacccggcaaacggctcaaatctgcagacgatacaaaagctgatggcgcaaatacaccagtaagtcagggcggaagcgagccccgcaccgactccgcccaatgccggcatgttgaatttcccgaaaataaatacataatttaaagcaaaattaataggcaatgagcaaagcgtaataagcattgtgactcgcgttttgccaagtgcgtcaataaacgaacgcaaaacggtgtacacaaacaaaggaaaaataccgagggataaaaagcctaaaaagtgtttggcgatcgtccggacacgaggttccagccccaaatgtcccaagatcatatcaacggtgaaaaagccgatgaggataaccgccgcactgagaacggccgctacataaacggcctggatgacggaaaacggcacttccttttgtctgccggctccaaacagctgcgaaacaacgggcgtaacggccattaatattcctgcaaggcccgtataaaccggcgtccacaggcttgaaccgattgcaaccccggctaaatcggcagcgctcactttccctgacatcaccgtatccaaaaaggtgatcagggaaaggcccgcctgtgtgattaaaatcggaatgaagatatgtaacagctgtctgaccttttggccgatcgtgttcgtttctctcaagttaggttccccgtttctttattttaacgagagaaattataacattttatgtataaaaagcaatgaaagccggcctactcttttttgtccggtttcggctttttaaacatcttggcataaatgaatgaaagtgaaatgacccctaaaaaggtgcagatatattgcatcagccgtgcgaattccatatgatgtgcgcctcctttcatgattatggtgcgcacagcggcgcatatccatgcgcgcgatgcagaaaataagggaaaggagctgatgtgacatgcgccacactcaaatgacggaaagcgcgtttaccgctgccgttcaaacgtatttgaaacaaattacagaggatgccggaatgatactgcggacattggatgaaaaagaccaatgccttctttgcgaattagatgaactgggacatacgtttcaggaaatgcaggctgtcgcttcgtcgttttacctgcagacatatatcgaacattttacgccttcctatacagagctggcgagggccgtgcagcatctggcggaagaaaaacacggagcgctgattgtgattgaacgtgcagatccgctggacggaataatacaaaaagggaccagcctgcatgccgagatcagtgcggctttaattgagagtattttttatcccggcaatccgcttcatgacggagccgtattggtcagagaaaaccgggttgtatcagcagccaatgtgcttccgctcacaacaaaacatgtcgatctcaaatacgggacgcgccacagggccgcaatgggactttcggccgtgactgatgcactcgtgctcgttgtttcagaagaaacgggaaaaatgtcctttgctaaagacggcggactgtatccgcttgtttctccgcgggcgcttcatgcgaaataataagaaaatgggaatattgtacccatttaatattaataaggtgaacatctttacctttttctgtattgatgttatcgtttaaatatacataaaatttaaaagaatagggagtggaaagatggcaaatgtattgatgatcggctttccgggagaaggccatatcaatccgtctttaggcgtcgtaaaagaactgaaggcaaaaggggaacatgtcgtatattacggcgtgaaggaatatgagaacaaaatcgcgtcaagcggagcggaattccgtgaatatgaagatttccgaaaagatgaattcggaaaaaacgcaacgggtgatgaacagcgggacgctaccgagtttttgctattaatgattgagacttccaaaaaagccgcactccgtattcttgaggaagtaaaggatgaatcctacgactacatcctgtatgatcatcattttctggcaggaaggctcgtgagaaaccagctgaaactgccggcatattcactttgtacgacatttgcaatgaatgaagcatttattaaagaagtgttttcaaatacaaaccttgtttcagaggaatcatctcattatccggcttataccgaagcggtcagccggctcaatgaagaattcagcgcagacattaaaacgccgtatgatattttctcaaatgacggcagaaaaaccatcgtgtttacttcaagagcgtttcagccgaaagaagaagagtttggcgattcttatctctttgtcggcccgtccattaccgaaagggcggcggctcaagatttcccgtttgaacagcttgaaggagaaaacgtcctgtttatttccatgggcacgatttttaacaatcagaaggaattgtttaataaatgcttaaaagcggtcagaagctttaacggaaaagccgtcatgtcaatcggcaaacatcttgatcaggcggagcttgatgaaattcctgagaatgtcattgtaaagccttatgttccgcagcttgagatcctgaagagagcggacttatttatcactcacggcggaatgaacagtacgagcgaagggctttactacaaaaccccgatgatcgtcattccgatgggcgcagatcagttcgccgtcggaagccaagtggaaaacacgggcgcgggcaagatgtttaaaaaagaagatgtaacagcggaactgctcactgaagcaataaaagaattgagcgaaaatcctgaatatcagacaaaagcttctgaaatcggagaatccctgaaagcggccggcggagcacagcgtgcagcggaattgatagcagaagatgtgaaaactgccgagacccgggttctgtaatcagccgtcacccgcttcctaaaggaagcgggcttttttttgattgtttttcgggaggatttttcacgccgtaaagagaattgtatgaaaaacagacaagaaaggtggaatgtcgcggaaaaaagccatgttatgaaaatgattccaaagtcttttgtgaaatgttctcaatttatgtaaaatgtgtggcattggtgatgatctaaggccatatgaatcggaattaatgtcgacttctgaatgaatcctgcataacaggcggcgtccaagaaaaggaacgttcctttcagcaatgataaataggaggtttttcgttatatgaagaaaaaaatcgcagccggtctggctgtatctgcagtaatgacttcaaccttcgccgtgcatcccgctgaagcaaaaaccattcaagtaaaaagcggcgactctctttggaagctttcccggcaatatcatacaagtatttcagccctgcaggcggaaaataaactgaaatcaacgatactccatcccggacagcggctgaacattcccgacggcagcggcacacataaaacgggtcaaaaaggaaaacgaagcacgggtgcttacacagttacatacggagactcactatgggtgatcgcaaaaaaatacaaaatgagcgtttctgagctgagaagcctgaaccgtttgagttcagatgtcatctacccgggccaaaaactgaaaattaaagggtctgccggcggcacggacggaggcggcagacagacaaagcctgataaaggcgcatcagggacttacactgtgaagccgggtgactcgctgtggaaaattgccaatcaaaccggcatcaccatcgccgaactgaaaaagctgaatcaattaacatcagacatgctgtatccgaatcaagtgttaaagattaaaggttcttcacataacggaaacagcggcacaacaccgccatctcactcaaacccttctgagaagccatccacttacaaagtaaaagcaggcgactccctctggaaaattgctaatcggttcggcatcaccgctcagctcatcagagaaaaaaataaattgacaactgatgtgcttcaaatcggacaggttctggtgattaacggaacaggaaaaacagaagatcctgtgcgtcagccggataacaaaccggcaaagccaaacaagccgaatactcccgaacctccggtgacagggtcaaagattgacagaatgataggcgaggcgaaaaaacatgtcggcgttccttaccgctggggaggcaatacgcctgcgggcttcgattgcagcggttacatctattaccttttaaataaggtaagctctgtttcccgtctgagcacggccggatattggaatacgatgaaacatatcagccagccgtcagcaggcgactttgtcttctttacgacatataaagcgggtccttctcatatgggaatgtatttaggcggaggaaattttattcacgcaagctcctccggggttgaaatttcaaacttaagcaatccatattggaaaaaagcgtatttaggagcgcgcagttatttttaaaaaaagcctttcggggctttttttgtttaccattttcacgttttgacaagactgatgggtaaaaaataagggggaggaagcatgaatcgtctcttgctttttctcatgctcgcatcaattacgctttgcggctgcggggggagacccgctcctgttccgcccaaaaaacatggggaaagccgcgcattggaaacatctgcataccgtgagcatgccggactcatcaatcaaaacggaaaaacgatcggatatattgaagtgagggaatctgatgatgaagggtcagacattcatatatcagcggggcatctgccgcccggcacttctctcggatttcatatttatgaaaaagggacttgtcaggcacctgatttcgaatcagccgggggaccgttcaaccctttgaacaaagaacacggcttcaacaatccgatgggtcatcacgccggggatctccccaatcttgaagtgggggccgacggtaaagtggatgtcattatgaacgcgccgcaaacttcattaaaagaagggagcagactcagcctgctcgaccgggacggaagtgcgttcgtcattcatgaacatacggacgattatttgacaaacccgagcggaaattccggagccagactcgcctgcgctcccctgacaaaaagcgcccgcagggaatgagcccttttgtattgagtatacaagggcttttttagtatactcggttacggaatacaaatggaaaggaaacatcacctatgacttcagaattacagcacctatcacttccggaagatatacaaaacaaattgcaggcttatcaaaatcatcccgtttcccaagaattccgggatttaatcggatcatcaggctatgaagccgaagataaagcgattgtattcgatgccgtcatcgctttgacaatgggaaaaaatatcttattaaaaggaccgacgggttcaggaaaaacaaaattggcggaaacgctttcgaactattttcataaaccgatgcacagcgtcaactgctccgtagacctcgatgcagaagcgcttgtcggctataaaacgattgaaaatgaacagggacaggcgacaattgaattcgttcccggacctgtaacaaccgcaatgaacgaaggacattttttatacattgacgaaatcaatatggcaaagcctgaaacccttccgattctaaacggcgtgcttgattacagaaaaatgatgacaaatccctttacaggagaagtgattaaggcaagcgaaggattcggtgttatcgccgcgattaatgaaggctacgtcggcaccgttccgctgaacgaagcccttaaaaaccgttttgtcatcattgatgttccgtatattaaaggaagcctcctgaaacaggtgctgacctctcagtctgtcttaaaagatgagaaattaattgaacgctttatgacgctgtcttctgatttaatcgcacaagcgcataacggacaagtgtcagaagaagcggcgtccatcagggctctcattgatacgtgcgacttggctgcgtacattccgccgaaacgggcgattgaaagaggcatcgtggaaaaacttgacgacgacagggaaaaagccgctgtcagaaatattgcagaaacgctgttcgaatgagggacatacaatgaagtttatcaaatttaatgacagcacgattgattcgtttttgttcatgatgctgactgacctggccaaaacactgaccagaagcagtgaagttgaagtggaatatggcgtgcagtcttactacaacccctttgaaaagaaaatttacatgagccacttttggaaagaccgatcagccggggatatggaagccggcctgaaaagcgatgtctatttgcgcgctgtcggaacacgcagcagctcatttcgggaatttgcggggtttttaaatgacgttcaccggcacttcacccgccaaagctttgccaagcagctgtttatgctgcttgaggatatcagaattgaagagctgatcaaaaaagaacggccgggaacgaaacgtgtttttcagaagcggagggagatgtacaggaaatatttcacgacgcagctgacattgaatttagaacggagcattttcaccgacgctttgtattgcgcgatgtttgtcaagctgacggctgagtctccgcttgaaggcattccttccatgcatgaacatattgatatgatgataccgtatattgaacgtcagctcattcgggtgtatgaggcggattctacggaacaaattgcaagaataacggaagacctcatggaaggccttgatgaagtgcttgagaaagatatgctgaacacgtacttttttctgccggaacttgattacgaaaaagcggctgaagagcctttattcgaaagcgtaaaaaaagcgccttcgttaagtgacgatctcacgctccctgagtcttccgacggagatgaagaaatccttgaagagaaaatgaatacgtggcaccgggaaaccgaagcgccgtcaaaaagtttccttcaatttgatattgagcacggcgcgaaatcagatcttgggaaagacgcggccagagaaggcgatgacggtgaccaggcgctcggctccgttcaaggttccgcacgtcagacgaaaagagaagattactccaaactggaagcgcttgaatccattcaggatgaacatgagggcgctgggctggctgacggaaaagaaaacaaatttgccttcccggtttatcaaacgcctcataaagcgtctcctgaagaggagcagtcttataaagaacaggcaaaaacgatagaatcatatcaaaaacgcctgaagcagatgatacaaaaaacacttgagcacaaaaaaacgctcccgcggaccgaccttcacgcaggccggctgaatcgcaaactgatccgctattttacggagcggaacccgcgccttttctataaaaagcaggacccgtcttcagacattgacgccgtttttacattgcttgtcgattgttcggccagcatgttcgacaaaatggatgaaacaaaaagagggatcgttctttttcatgaagccttgaaatcagtgtccgtaccgcaccagatcgtcgggttttgggaggatacgaacgaagcgactgaaacgagccagccgaatttcttcaataccgtcattccgtttgaagagtcgctgctgcaggcggcgggtccgctgatcatgcagcttgcgcctgaagaagataacagagacggatacgccatcagacaaatgacgaaacagctgatgcggcggagtgaggcgcaaaaatttttaatcgtgttttcagacggagagccggcagcattcggatacgaacaaaacggcatcgtcgatacgagcgaggctgtcatcgaagcgagaaaaaaagggatagaagtcataaatgtttttctgtccaatactgcgatagaagaatcacagatgaaaaccattcaggatatgtacggaaagtacagtatttttgttccggatgtcgatcagctgcccgatgtgctgtatccgctcttgaaaaaactgcttcataaaagcataggataggctttttcctatgctttttcgctttttattttaaaatgatttaattttttcggtattgatctgttttttttactattttgtgaacaatcaaggtagaatccaaacgcaatcagtggtaaaatatccttggaagcgtttttattacataattttgggcacagcgttcaaaagttatttcaagatagtgaattgatcacttgattatctaggttgggggtaatattcaaatgtttcaaaataatatgaaacaaagaatgaattgggaagatttttacggaccgaacctcggctatgcactggagctgtacgaccaatatgctgaagatccagacagcattgatccggatctgaaagacatgtttgacgaactcggcgctccgccaagccaaataaaagaggtatcgggaacaaaggaacagggacgcgtcaccgcagatctgattcaaaagatcgcagcagcagttaaacttgcagaagatattcgaacctatggccatctgaacgcttccgtcaatccgctcagaaaggatccgaaaaagagcgagctctttccgttatccgagtatgggcttacagaagaagaaatgaaagcaatacccgcgtctgtcatctgtaaagacgcacctgccaatataacaaacggcttagaagccatccagcatttacgcaatacctataaaagaaccatctccttcgagtttgaccatgtgcatgatttcgaagagcgcgcatggattacaaaaatggtcgaatccggagaactgttccggaaaaattcaccggaaaaactgtcagccgttttagaaagactgacggaagtagaaggatttgaacaatttttacaccggacattcgtcggtcagaagcgtttctcaattgaggggttagacgcgcttgtgccggttcttgacgacattatcgcccagtctgtgaaagcgggcacaaccaatgtcaatatcgggatggcgcacagaggccgtttaaatgtgcttgcgcatgtgctcggcaaaccgtatgagattattttctcggaattccagcacgcgccgaataaagaccttgtgccgtctgaaggatcgaccggcatcagctacggctggacgggcgatgtaaaataccacctcggtgcagacagacagcttcaggatgctgaaaccaaaagcgcgcggattacgcttgcaaataacccgagccacttggaattcatcaatccgatcgttgaaggaagcacgcgggcggcacaggaaacaagaacgcaaaaggggtacccggttcaagacgaaacaaaatcgctcgccattttaattcacggtgacgcagcgtttccgggagaaggcattgtcgccgagacgctgaacttaagctctctgaaaggctatcaggtcggcggggccattcatatcatcgccaataatatgatcggctttacaactgaaagcgatgaatcacgatccacgaaatatgccagtgatttggcgaagggctatgaaattccgatcgttcacgtcaacgcggatgatccggaagcatgcctgtcagccgttaaatttgcggttgaataccggaagcggttcaataaagatttcttaatcgatttaatcgggtacagacggtacggccacaatgaaatggatgagccgtcaacgacacagccgatgctgtatgacgccgtcagaaaacacccgactgtcaagcggatctttgcggaaaaactcgtaagtgaaggtctgatcagcgaggaaaaagcgcaaaacatcgaaacggcagtgacaaaacgaattgaagacgcctataaaaaggtgcccgccaaaaaagaagacgccgtacgggaaattgaattgccggaaccggtgtccaacggttttccagacgttgacacagccattgattttgatgttctccgcaagctgaacggcgaacttatcaactggccggaatcttttaacgtgttcggcaagctgaaaagaatcctggaaagacgtgcaaaagcgtttgatgatgaccgtaaagttgaatggtcattggctgaatcgcttgcgtttgcttccattttgaaagacggcacgccgatccggctgaccggacaggattcagagcgcggaacgttcgctcaaagaaaccttgtgctgcatgacagcgaaacaggagaagaatttgttgccctccatcacttagacgactgtgctgcttcatttacggtgcataacagcccgctctctgaaggatcggttctcggctttgaatatggatacaacgtgtattcgcctgaaacgcttgtgatgtgggaggcgcagtacggggactttgccaatgcggctcaagtctattttgatcaattcatatctgcaggacgggcaaaatggggacaaaaatcaggactggtcatgctgctgcctcacggttacgaagggcagggccctgaacactccagcggccgcgtcgagcggttcctgcagctggcggcggaaaacaactggacggtggccaacctgacaagtgcggctcagtatttccatattttaagaagacaagcgaaaatgctgcttcgtgaggaaatccgcccgcttgtgatcatgacgccgaagagcctgctgcgcaacccgaatacggtatctgaagtgcaggaactgagcgaaagcaatttcaagcctgtctatgagcagtccggtctttcccatgcttacgaaaaagtgactcgcgtcgtattatcaagcggaaaagtgtcaattgatatcagcgatcacttcaacaaaatggaaggcgataaggattggcttcatattgccagaatcgaacagctgtatccgttcccggcaaaagatacgaaggagcttttcgccaaactgccgaacctgcaagagatcgtttgggttcaggaagagccgcagaacatgggggcatggagttatatcagcccgtatctgacggaaatcgcgccaaaaggagtaaatgtccaatacatcggccgaagaagacgatccagtcccgcagaaggagatccgacagtccacaaaaaagaacaggaacgcattgtatctgatagcttgactcgcaaaaactaagggggaaatgaaaaaatggcggaaattaaggtacctgaattagcagaatcaatctcagaaggaacgatagcccaatggttaaagcagcccggtgattatgtagaacagggtgagtacttgcttgaactggagacggacaaagtaaatgttgaattgacagcagaagaatcgggtgttctaaaagaggtattgaaagattcgggtgataccgtccaagtaggagaaattatcggtaccattacagaaggcgctggcgaaagttctgcacccgccccttcagaaagtgctccagccaatgaacaaacgaaagaggaagcaaaagctgaacctgctgcacaagaagtcagccaggaagcacaatcagaagcgaaatccagaacggtagcgtctccggctgcacgcaagctggcaagggaaaaaggaattgatctatcacaaattccgacgggagacccgctcggccgcgtgcgcaaacaagatgtggaagcttatgaaaaaccggcttcaaaacctgcggcacagccgaaacagcaggctcaaaaaacacagcaaagctttgacaaacctgtcgaagtgcaaaaaatgtcccgccgcagacagacgatcgcgaaacgattggttgaagtgcagcagacttctgcgatgctgactacatttaacgaagttgacatgacggccgttatgaatctaagaaaacgccgtaaagaccaattccttgagcaaaacgatgtaaaactcggtttcatgtcgttctttacaaaagccgtcgtggctgcattgaaaaaattcccgctccttaacgctgaaattcaaggcgatgagctgatcgtgaaaaaattctatgacatcggtatcgctgtcgcggctgaagaagggcttgtcgtcccagtcgtgcgtgacgctgaccgcctgacgtttgccggcattgaaagagagatcggcgaacttgcgaaaaaagcgcgaaacaataaattaaccttaggtgagctgcaaggaggctccttcacgatcacaaacggaggtacattcggatcgcttatgtcaacaccgatcctaaacagccctcaggttgggatcttaggtatgcacaaaattcagctgcgcccagtagcgattgatgcggagcgctctgaaaaccgtccgatgatgtacatcgctttatcatacgatcacagaattgtagatggtaaagaagcggtcggattccttgtcaccattaaaaacctgcttgaagatccggaacagctgttgctggaaggataatttgagacagacaaaaagtacactgcccttacaagcagtgtactttttttattgagagaaggggagaatttatatgaaaagctgttatccgcttgagatcgaatttgaatataatgaagaattgcattctatcactccggttcttctgcaagacgaacatgacacgatattaatagactgcggatatcccggttttacaaaccatcttcaacacgctgctgcccggcatggaatgtcgcttcattcattgacaaaaatcattgtaacgcatcacgacatagaccatatcggctcactcgctgcattataccgtttgcatccggatgtcagcgtgacagtacatgagcgtgaagcgccgtatattgacggctctaaaaaatctttacggcttgagcaggctgaatcaacgttttgttcattgccagaggatgcaaagccttatgcaaaacagttcatccgctcgcttcaatcagtcgaatcggttccagttcaccggacagttactgacggcgagctgctgccttggtgcggaggcattcgcgttgtagccacgccgggtcatacacccggccatatcagtctttatctgcctgctgaaaaaacaatggtcacaggtgatgcggtcgtcattgaagacggaaagctgaaccttgctaatcccggctatacgttacatatggatgatgcggtccgttctgtgcagcggctgctcgattacgatatccgccaattgatttgttatcatggaggtttatttcagggggatgtaaaaaaagcgcttttgcgcctgtttcgtgatctgcagaataaacaaggataggagcggcagcagcctatcctatccttgttcatttatgaaaacggaatctttgccgtttctttttcttcggcgctgtttttctcttttttcttagaccagtaggttgcaagaacagaccccgacagattgtgccatatgctgaaaattgcgctcggcacggctgacaaaggggagaaatgcgctgtcgcaagcgctgcacccagtccggagttttgcattccgacttcgatcgcaatcgctttttgtgaagcataatccattttgaacagctttgcagtcaggaatcctaacaaatatccgattccgttatgtaagatgacgacagacacaatcagcagtcctgattgaagcagatgctcacgatttacgctgacgacagaggatacaatcgctacgatgccgattaccgacacgagaggaagcgcgtgcacggcttgtccgacctgttttttgaagaacagcttcacaatcaccccgaggacgatcggcaaaagcacggcttgcattatggaaacaaacagtgaaccgaaagaaacggggagccactctttcgcaaacagcataataagtgccggcgttacaataggagcaagcaatgttgagatcgtggtgaccgcaacagaaagcgccgtattgcctttcgccaaaaacgtcatgacgtttgatgccgtaccgcccggacagcatccgaccagaatgacgcccgcggcgatttctgcggggaggcggagcccgattgataaacagaaagccgtaagcggcataatcgtaaactggcaagcgactccgatcacgacatgccaaggctttctgattaattctttaaaatcgtctgcttgaagagttagccccatcccaaacataataataccaaggaaaatcgtcatataagaactgatccaagaaaacaaatcagggcaggcgaatcctaaaccggcaaagacgataacccacaagccaaaggtttggcctgcaaacccgcttatttttttcagccattccataaacacagctccttttacattcaatcaatcagtcagaaaatatgactgacttttctgtattccattataaataattttctgaataattcaatattaaacataagttttcaataaaattattatgtaaactaacatcttcttgactattcagacatatattcttacaattgatttttatactgaaatgaattgggagtgctgaagtgaaagaagctaatcaatggtcatctaagctgggatttattttagctacggccggctctgcaatcgggctcggcgcaatatggaagttcccttacgtagcgggaaccagcggaggcggcgcttttctgcttgtttttattttatttactgttttaatcggactgccgcttttgcttgctgaatttattatcggcagaaaaacacaaaaaaacgccgttgaatcctataaggcgctcgcgccggggaaaaagtggcactggatcggatatctcggaatcattacgtgttttattctattatccttctacagcgtagtggggggatggatattaatctacattataaaaggctttacaggcggcttatcgctttcttcgggatttgatacgttatttatcgataccatttcaaacccttatgcagccgttttcggccagctgctgtttatcgtgctgacgattttagttgtggcaaaaggggtgagcaacggaatcgaaaaggtaagccaggtgctgatgccggctctgtttattctgtttattcttttaatgatccgctccgttacgctgcatgatgcagcgaagggattaaaattcttttttatgcctgattttggcgcgatggatgccaataccattttatatgcgatgggacaatcatttttctcgttaagcgtcggagtgtccgtaatggttacatacagcgcatatttagaaaaagaagaaaatattgttcaatccgccgtgtcggtgacggtattaaatgtccttgttgccgtgatggcgggagtggcgatttttccggcggtgtttgcattcggcctcaagccggatcaaggcccgcagctgttatttaacgtgctgccgaccgtctttaaccaaatgccgttgggcatcgtgtttttactcgcctttttgctgctgtttttatttgcgacgctgacatcggctttttcaatgcttgaaattttagttgctgttttgtcaaaaggcgattcggcaaaacggaagcggtatgcatggatagggggatttgctatatttattgtcggggtcccttcggcgctgtcgtacggaattttgagtgatgtttctatttttcaccgcagtatttttgacgctgcggattttctggtcagcaatgtcttaatgccgctgggcgcgctattaattgccgttttcgtaccgctgaaaattccgaaacagatgctgtttgacgaactgaaaagcggttccggtataaaacgaaaatggtttgcagtctggctcctattaatccgttatgtggctcctgtagccattattatcgtttttctgcacgtgcttggtattttttaagccaaaagaagcaggcccccgttcaagacgggggcttttttaataaagcggccatatcacgcggtgcgcttgttcgaaccgtttctccgcctcccgccaatcaacgacattccaccattgatccacgtaagccgcgcggtcgtttttatattgtaaataataagcgtgttcccacacatccagcggaagcaaaggaatgacgtcccactggctgtagagctgatgcttctcagcggccaaaatctccagccgcccggcgcgcggcgcccagactaggatagcccagccgactccttcgacttttttcgccgcttgagaaaattgctctttaaaagcggaatagcttccgaatgacacatcaatcatttgaaagagcgcacccgtcggccgtctttttccgtttggattcatcgaaaaccagaaaatactgtgcaaataatggcccgcgccgtgaaacgccaattgccgctcccaatgcgccactaagtcgtactgtttcgtctgtctcgcttttttgagctccagttctgctttattcagaccgtcaacatagctctgatggtgtttggtatggtggagtttcataatctctcttgaaatatacggttccagtgcggaataactgtaaggcagtttagggaggacatgcttgccgatcggcacataagctctgcgctcatccggctcttcgggttcagtaatgtcccggtaaagtgccgatgcctgttcgtaccattccgcctccgttaatccatcatcctgaagggtgtgaaaaatccggtcgatttgtgccgcgaagcgatcgaaccgaccttgctgaatgacttgttccttcaaggtttcacaccaattcagcatctcggtttgataagcgtgccgtttcatttttcttcctccttttcactcactttcataaaagtgctgagcgcaagcaaagaaaacacatacgggtagctgtgatacctgatgtaaaactgcttcggcaggccgattccggtcggatagctgaaagcggcgccttcgtaatgccggttttcaataagaaaagatatgccttttgtgacggcttgatgatgagttttttcgtattgcagcaaagcttcggccgcccaagccgtctgtacaagcgtcccgtaagaaagcggaacataagttttgacttctgcgcttttacaggattccccccagcttccgtcctcgttttgaatggacttcagccagcggatcgctttttttacggccgggtggttttggctcacgccgcaagccttcatccctgtcagcgccgcccatgtgccgtaaatatagcagacaccccatctgccgtaccacgatccgtcctcttcttgatggcggatcagccattggacggctttttcaatctgagggtgatcagaagaaagccccgcttttcctaaacagtgcagcacccgtccggttaagtcgcttgttgaaggatcgatggcagcttcctcagccgattccagcggcagcaggcggaccagcggatgattgacatttttctcaaaagcagagaagccgccgtcactgttttgcatggacaatagccagctcagtccgcgttcccatgaggcgggataaagttttcgcggaatggctttgagcactgcggctgtgtcatcacaatcaggattatttgtattaatgtttgaaaaaccccatcctcccggttcagcatgcgggttgtgaacggcccaatcagcgactttcgtctgctgccgttcacgcagaaaccgggcggcgccggttatcatctgatcgttatctgagatgccgcttttcataagcgcatagttgagaagggccgtatcccaaacggtcgacgttgaattttccaggtacggtatattgccgcaagatgtgagcaaagctttcgtgccggcaagtgcttttctgataacgggggagtggcgcgatacaccgagagcgagcaggccgtacaccataaaaatagtggcactcgcatagctgtataatgtgccgtcttcttcaatccggtcaagcatatacgttttggccgtacgcagaccgagctggtgaaaagcggcaggaatctgcaaaagccgcttccagtgcgtgaaaagagaagagaggtctctgttctcatcctgatcggaacgaagccatgtaaacggatttttagtcatatgccgatctaaatgcgcaagagacggaacattgggatttttcagcgaaaatcttttgttaagcgtcacggccatcggtacaaaatgaatacgggcgtatgtactgaactggtaaaaatgcagcgggaaggatgggggaatgactaagaaagataatggcagatgcagcgcgggccatggataaaggccgtttgccgcaagcatccactttgtcataaagtgtacgttgcgcaagccgccatttgagatgataaagcgttcggcctgaatcatatgcgcctcagaacggctatataaaccggaagccagcaagccggcatagccctgtacagtggcggtcacatttcctttccggtcatcaggatagttggcaaaagttccgtccggacgctgtttagcgcgaataccttctgcaagctcagcgatcagttctttatcattgtctccaagagaagtgaggaggaggatcagaaaggcgtttgtcaaaatcggtccttcaaaacaaaatgaccatgagccgtccgcattttgcgtttctcttaatagggagatggttttcttttggcggcttctgacgttttcatgaattgtgctcacactcgctcaactccttcagaagcatatatattcatatgtaaaaggcggcatgacaaaagaaagaaactgctgacaggcagcagtttcttgtttgatttaatcttccagattgatccagacgctttttacttctgtataattattcagcgcgtaagagcccatttcccgcccgaggccggattgcttatagccgccgaaaggagatgcagcatcgaaaacattgtagcagttgacccaaatagtgccggcttggagacggtcagcaatgtaatgggcgtttttcacattctcagtccaaagaccggctgcaagtccgtattccgagcggttcgcccgctcaatgacttcatctaccgtatcatacggaatggcggctaaaacagggccgaaaatttcttcttttgcgatggtcatgctgtcatccacatccgcaaatacagtcggggagacaaaatacccttcttcaaacgggcagctgccgcccgcgacagctttggctccttccgcttttcctttttcaatatatgaaagcacgcgctcatgctgttcttgactgacgagcgggccgatttgtgtatcttggtgaaggccggcgccttgctgaagcgatttcgcatatgaaaccatttcgctgacgacctcatcatatttgtctttgtgaatgaagacacgggagcctgcgcagcatacctgcccctgattaaacatgaccccgtttaaagcgccgggaatggctttcttcaaattggcgtcaggcaaaatgatgttaggtgactttccgccaagctccagtgtcacgcgtttaattttttttgcggctttttccatgatttttttgccgatttctgtagaaccggtaaaagcgagtttatcgacatcgtcatggttggtcagcgcttctccggccgtctcgccgaaccctgggacaatattgatgacgccgtcagggaagcccgcctgatctattaactccgctaaatagagggcggtcagcggtgtctgttccgccggtttcaaaacgattgtgcagcctgtggcaagggcggcgcccattttccacatcgccataaggagcgggaagttccaagggatgatctgccccacgacgccgacaggctcatggcgggtgtaattaaaatatgagccagcgaccggaatcgtttgtccggttatctttgtagaccacccggcataataacgcatatgctcaattgcgagcgggatatccccattcgtcgtttcattaatcggttttccgttatcaagtgtttcaagctgcgcgagttccgttttgtgctcttccattaaatcggcaagcttatacatcagcctgcttctggaagcggccggcatagtgcgccattcgccgtgatcaaaggctttgcgtgccgctttcactgcactgtcaatgtcttctgactgtgcctcgtaaagcgtcatcagcgtttctccggttgccggattcggtgtgacaaatgttgatcctgaagcgctcggaacaaattttccgtcaatataaagtttcttcgtaccctgtaaaaatgtttccagcctttttgtgatctgcatcgttaaagaactcattcgtaacaaacctcccgaaatttttttatggtctgttttgagcatcttgatgtccgcgcgaagtaagcgcatacagtcattttataataacacctccggtaaaatcaatcgataaccgttattgcaattcacaagaaaaaacggctacaataagtttatcgattaagaaaaggagttttataaatgattcataataattggcagacaaaagaaagcgccaaaaaggtcaaatgcgtacatacagatgcgaaaaaatacattgtcaaaaatgtgctgacgccgggtaaagagtatgaagtcaaaaatgaaacagaagaattcatttttgttgtagacaatacaaacaaagtcggaggcttctacaaagagtattttgaagaagtttaaagctgaatgaatttattttgcctgagccatactaaaaaagactacatataaagggtggctgcaaaatgaaaaaaacagagcaagacaaacaaaataaaacatcagatcagcttcagcaagtgcaacctgaagaaggcaccgacacgacgatggaacaaatttcagatacctataaagaaggaacaattgaagatacggatcgttgatgttttgttaaaaccgcggcattgaagaagccgcggttttttatggcgaaaataaaaaactgacttttcgaaaaaaataccgttttcttgaaaccttttctttcgctgaaccgtactacttcataacagcggcacctttcgcgaagggcttttttgatgaacgttctaaaaatgtaatctgttcgtaatggtttaaatgccgtctatgtcgtattcttatatagggataaagaacttatttttttatgattgtaataaaacaatagtatagaagcagaaagtggggttcttcattgggaattttttctgtcagcagatcaaccgacacaaaaaagctggaggctttgctcgttgagggagaacggatcgaaacgatttataaactgcgggttgaccaaatatgctttacgaataaacgagtgattttctttgataataaaatgttctccaaaaagaaagtgcgcgtatttcttccatataaaacaattgaaagcttcgccattcaagaagcggggatgtttgatcccgataccgggcttgtattaatgacaaggggaaaaactttcgaattggaatttgcaaaagaaacggacttgactgaggttcaagccatcttaacaaaatacttatgcagttaaatatcacataaaagccatccgaatgcatgcggatggcctttttattatataatgcttgtttttccggagttcgaatcaatgagatccggatcagcaatagaactgatggggatataaatcggcgccaaatcaccattttcttcaccgaatccgtagttgatcttattggataaaaaataatcgatttgctgatacgggccgatcgtaatggaagaaccgcggtcgactgcatttactttaaagcctcctacatttaccaaaaccggcgaaaacatcataatgggcctccttttccggcagggattttatcgcatgcagactcaaaggcagatggagaatcaatttgatcccggtcatccactttgccgttcgtgccgatgaagccgcttgcatctccgaagttctgtccgtatccctgattctttttatcagaattctgccattccgccagtaaattttgtccgacattcaccgctgaagcattttcaaaggaattaattttcaacatgaaaatattaatattgatatatggagttggttgaaccacaggcaaacctcctttaatacaggtgtatgccggctgttatgaccgtatgcttagacagggggcgataaaaatggatttcgataagatgaagcagtggatggaaatggcgcaaaacatgtccggcggcgacttttggaaaaacgtttttgatgatgaacaactgaaatcatttcaaaacggccattctcattttccctttcaacagggagatgggcaaatgagaagaaatgaggatgcttttcctcttatagatattgtggaaacccatgatgagctccaatttttgctgtatctgcccggctaccggaaacaagatgttcagctgctgtcctacggagaatatatcgtcgtaaaaggcacgagaaaatccttttttaatgaacaggattttaaacagaagaccggaaaatacggcgattttgaaaaaaaactcgaccttccgcattccgctcaggggacgaagggaatgcaggcggtattcaaagacgggattttatatatatcgattgctaaacatctgggggatgcaagccagatcattatcgaaggctgatcttgttcgcggtgccatctattaaatctgaatcatcgatactcatgatagggatgacgacaacggtgcaatcaccgttttgttcaccatacccttcatttcttttattggctgctgtgtttctcaccataatggaagagccggtgttaaaagctgctccgccgctgattccgttcatttttatatactcaaagttgataacggatggaaaaaacatcatgattcgcctcctttttgtatatcatgtttatatattcgcaatgcgggacgcatagaactttccaagagtgacggggaaagaagtgattttctttgaaaaaaataatgaaagagattttcaaaaaagtgtgtgaagaagaattggaccggcttaagaaagtggaacaacagcttgatgagcttcaggataagtgtcattttgagccgcaaacggttgaaggggaaaaaacatatgtccatattgagcatgtcaaagtggacaaggttgaatacaatattgattttgaaaagctgagtatagaagagctgagcggtatgctgaatatcggcgccacttaccatacaccggagcataggcttaaacaagcctgcgctgaagaatttggggacaaccggcaaaatgacgctgcgaaagaaaaaagacagacaaagcagcagacacccaatgtcaccatcagggggagaaagcattgacctccgttgtttcagcctcctttttctagggtatgtattaacagatgcagcgaagaatacagacgaaaaaggagatgatgaatatgtcattatcaaaagaacagcaggacagcctttatcataaattaatcgatttaaaggaaagtcttcagggagaatcaaaagaaaatcattcaatgagcgaagacacaggagaactatcgaacggagtagataatcacttagctgatcacggaagcatttatttggacagggtcacgaatcagacgctggacggtgtcgatcagaatcttttagatgaggtgaacgccgcgcttgaacgaatggaaaaaggaacatacgggatttgcgagaaaacgggaaaagaaattccttatgaaagacttgaagccgtaccgtatgcaagaatgaccgtcgaagcgcagcgagaaacagaaggggatgtgaaaacaggcgctccgtcatatgaaagggaatttcacgagcaggtgaaagacctctcaaataaagaaaccgttgatcaaaaaagctcacaaacttacgaaatcctggatcgcgagcaggattcacaataatagcagcaggtacattcatatgtacctgtttttttattccataaaaaatctcaaaatcgaaataaaatcattgactttatataaaaaagaaagtaacatactatttgtaagtaaatattaaaagattaccgggaggaatttagaatgtctcaagtattatttgtaaaatcaagtgaccgtacggctgaagaaggcgtgtccgtaaaattatacgaagcgtttctggctgcttataaagaaaacaatccgaatgatgaagtgatcgaacttgatcttcataaagaaaaccttccttacctcggaagagatatgattaacggaacattcaaagcttcaaaaggaattgaaatgacagacgaagagaaaaaacaagcgtcaactgctgacatttacttaaatcaattcgtcaaagctgacaaagtcgtgtttgcattcccgctttggaacttcacagtgcctgcagtgcttcatacttatgttgattacctgtctcgcgcaggagttactttcacatacacgcctgaaggaccaaaaggtctgatgggagataaaaaagtagtgctcttaaacgcacgcggcggcgtatattctgaaggaccgatggcatctcttgaaatgtcattaaacttcatgaaaaccgttctcggtttctggggtgtccaagatcttcacactgttgtcgttgaaggccataatgctgcaccggataacgctcaagcgatcattgaaaaaggactgcaagaagcgaaagatctggctgcaaaattctaatttccattaactcttgcgcccatacagggtgtgagagttttttctattatagaagaaactggcggcagctttcgatctgatcttatattgatatattgatattgtgtcgaaaaaacaattttcatgtagaataaagcatttttcacaaagaaaaaaggttttctgtaaaagaattaaccctcttgccaaaatacgactgatggtgtaggatataagagaagctacattgttcgtattgttaattaagttttaacctttaagctgtaatagggagttttatatcgaagccggaatgtcatgcctccattgcagaggacgacaggaacgcttctgcaaacacccactttgaggagtggtggtttaaaactttcttacttgcgtacggcatacgtagcgaaagccatttcccttgcggagatggctttttattttgcattgcccttgagcagtgtactttatcagtatgataaaatgaaagaatcaaagacaaagtgaggttttacaacatatgctggataaagcccaatcccttctggcgcattattttggctacgacagtcttcgcgcgggccaaaagcaggcgatacaatcagttgcagaggagagaaaaaacacggtctgcattatgccgacggggggcggaaaatcaatctgctatcagattcccgcactgctgtttgaaggaactacaatcgttatttcccctcttatttccttaatgaaagatcaagtcgacgcgcttgaagaagcgggtatcgcggcagcttatattaacagcacccagacaagccgtgacattcatgagcgcctgaccggtttgaaacaaggggcttaccggctcttttacatcacaccggagcgtttgacttcttctgaattcattcacatcctgcagaatattacggttcctcttgtcgccattgacgaagctcactgtatatcgcaatggggacatgatttcaggccgagttaccggaatatcgaaatcctttttaatgaattaaaagaaccgcccgtcatcatcgcattaacggcgacggctacgcctgaggttcatgatgacatctgcaagcagcttcatattaagaaagaacaaactgtatataccggttttgccagagagaatttaacgtttaaagtagtaaagggcgaaaacaaagaccggtttatcgagcggtatctggaaaaaaataaacacgaagccggcattatatatacagcgacaagaaaagaaaccgaccgtttatatgagaaattaaaacgcagcggcatcaatgccggccgttatcacggcggattggcggatgatgacagaaaagatcagcaggagcggtttcttaacgatcagatacaagtgatggtagctacgtccgctttcggaatgggaatcgataagagcaacatcagattcgttttacacgcgcagattccgaaagatatggagagctattaccaggaagccggacgggccgggcgcgatggtcttaacagcgagtgtgtgctcttgttttcgccgcaggatattatggtgcagcgttttttaatagaccaatcggccgctggagaagaaaaacaaaagcaggatctcaaaaaactgagacagatggtggattactgtcatacggaagattgcctgcagcggtttattctgaagtatttcggcgagaatgaggcggaagcttgcgaagcatgcggcaattgcactgatacaaggaccgcccatgacgtcacaaaagaagcgcagatggtattatcatgcatcatcagaatgaatgagcgtttcggaaaaacgatggtggcacaggtgcttagcgggtctaaaaataaaaaagtgctggaaaacggcttcagcagcctgtccacttacggcattatgaagcatcaatccgcagcggaaatcagtgattttatcgaattccttatttcagatgaatatatcaaaatggcggacggcacatttccgacgcttatggtcacccaaaaaggcagggacgttctgcttggaaaaagcgcagtcgcgagaaaagaagccttacaggccgccgccgttaccgaaaatgatgaattatttgagcttctccggcgtctccgcaaagagattgcagctgaacagggtgtgcctccatttgtcgtgttctcagatcagacgttaaaagaaatgtcggcgaaacttccgaaaacggatcaggatcttctttccgtaaaaggggtcggggaacaaaaaagattgaaatacggagcggtttttttagaagaaatccgaaattatgtaagagaaacagagtgaaaaaaagtttttttagaaatttgcacattgtgtttttcattggcgccggaaaaatcagaggcttgaaaacccttgctgtatcaaggtttcagcaagacttaccaagcgagagaaatgtttcatgtaaaggaactgtaatctaattcaaatcgttttgttattgaactgacattttcatatgttacgatatcacctgttagccgccaataaaaagctaacaagggaggatttacttatgaagaagacgattatgtcctttgtcgcagttgcagcaatttcaacaactgcatttggagctcacgcttctgctaaagaaatcacggtgcaaaagggtgacacgctctgggggatctcgcaaaaaaacggagtgaacctaaaggacttaaaagaatggaatcagttatcttctgatttaatcattgaaggagagaaactgactatttcttcagtagaaacaaccacatctgggcagtacacagtgaagcagggcgacagcctctggaaaattgctcagaaattcggaacatcagtcggcaatctgaaaagcttgaataacttgcaatcagatataatttacgcaggcacaacgttaaatgtgaaaggtcaggctcaggctgcacagccggctcaagaagccagccagccgcaaactgaacaaaaaccagctgccgagacagaacagcctaaacaagaagctgtcaaaaacgagcagcctaaacaagaacctgttcaagaacaacaacctaaacaagaagcgaaggctgtcgaagcaaaacagcagcctgttcaatcaaatacaaaccaacaagagcctaaaaagcagctgacaatgactgcaactgcttactctgctaacgacggcggcatttccggtgtaacggcaaccggtgttgacttaaacaaaaaccctgatgcaaaagtcatcgcggtagaccctagtgtcattccgcttggctctaaggtttatgttgaaggttacggagtggcaacagcagcagatacaggcggcgcaattaaaggaaataaaattgacgtatttgttgcaaagaaaagtgacgctaacaactggggcgtcagaacagtaaatgttaaagtattagactagtttcatatagagatgaagaacacaaggcgaaatgctttgtgttctttttttcttcccttttttgactgtatataatcgttatatgcggaaaaagaaaaagcgtttctctaatataataaggaatggatgtgaaaacggaatctgaaggggtgtatgaaactgatggagccggaatttatatgtttatggaatgccttcacagaatcaccggtgtttcaagcaggtatatgcaccgctttcgccattgtgctcgttatcggactgtctatgcctgctgtcaggctgtttcaggcgcttgacagagggagaggaaggccagccgttattgaaaaggtgagacgtactggcgtgatgaagaatggcaggcacgagcttgtgcttattttaaacgtaaaaaaccaagacggaacgcatgataaacgtgaactgacacacgccgtatataatgaagagatcagccgtttttatgaaggagcttccgtatgggtgacggcagcggctggcggacgaatgatgatcgctccgcgcacgccgcggcataaggcgtcaaaataaaaagacggggcggttttcccgtctttatgtattaatgccgatcgatccatatccgtccgccttctgagccggcttctatcctgcatgttcctccgatcgggaatgtcatcaaaggggaggtatggccgaaatcagcatttgcgataacaggcatggatgacagttcttcttttgtacggatgacggcacagagagcctcctcagacacatttgaagcatgctggaaacgtccgatgacaattcccttcacggctgaaaaagcgggaagatggatgagtgactgcaaatcccggtcaaacatatgaatgtccgacatatgatcatcttctataaacagaatcacttgttccatctccggaaagtattcggtgccctgcagaagattcagtgtgcatagatttcctccgatcagtgttccttccgcatatccgggttgaataacgagcggtcccggattccgataaaaacgtctgtcctcctggttcaaataccatttatcatcactccactcggatgaaggctttacctcatacgggttgtcagaagcacagcaggccaagaaagagttaattgtatagtccagcccttttttcatggcaaatgaagaaaaatggggaccggaatatgtaataaggccggttttttgatatatggcatggccgagagctgtaatatctgaatagccgcaaaggattttcggatgccgcttgatgttttcataatcaagatagcggagcagctgatttgattggaacccgccgagtgtcgtcaaaatcgctttgatgtcaggatcagcgaaagcctcgtgcagatcccgtacacgcgattcaatggatgatgaatcaaattcatttatttctttcgcattctctgaaaaagagacacaaaagcccagctcctccaattttgtcttcgcggcatttatattttcatctgacataacggacatgcttgtggccggagacacaatacgaatgccgtcaccttttttcaatttttccggatacaaaaaaaaccctccttaaatggtttaatttattacaccatattaacgagggtttatctatcattttttacaggtcgacccatttaatgccgcctgattgcgtatcattgtcaatccagacatcaaagtgatgcttttcataaaaatgaatgagtctgtcgacatgatcccaatcacgcttagcgatgtcgcccgtcactttcgggatattctgctctctggcgatatgttttaaaaatttcatgcagatcgagccgtagccgtggttcggcgggcctttaatgtccccgatatgaatggcattgtcatagtaagaggcgatcagtgaaaaacagcctcttccccggtaggctgactcacaatcagtcagcataatcttacatgtttggccatcatcaatcgaggaaacaatgatccaatcgtcattgttcgattgatcaataccaagcactcgcgcgtcttttgatacatctatcagattttcccgcattctgaaaatctgaaattcaagtttatgaagctctttttccagctctttctgatctctttcttctgcagtaaacaagatcatactcctttcacagcgtaaaagtcttagtcaaacacaagtatccattgtagtaaatgatgtcttggtttgtaaataggttttgcaaaaacttttttagaaaagtctgccgtttatatgtggattaacgtttttaaggcggtgcggatagggaaaggaacagtgagcagcggaaaaaggaggaatctataatggcaattgactcactcatcggcaaattgaagtacgtaatgacggaatctcctgataaaatgctttccttatatgtaaatacggatatgagaaatccggatcagcaggggggagagtggaaaatcgccttgaaaaccggttttcggagattaaaagagtatctgtctgtaagtgatccggaagaagaaaaatctctcgtccgcatcatggaacgtgtctatcaatatatcgatgggcttggtaaagagatgccgcgtagtctcgtgttttttgcatcgggagaaggcggtatctgggagacgattgaattgcaggtgcctgtcgaaacacgattttattgggaagaaacggctgtccttgatcaattagaacttctccgtgaacaatttccgagcacggcttttattctcacccagcagaatgaagtgaagatcatagaaaccgtactcggaaaaattgaaggggtggagcattatcaatacgacgtcatcaatgaatcgtggaaaccgcaggatgtaagcggaagctccgcatcgatggacgaagacgccgccaaagcccacgtcgaagaaaaccaaaacaggctgtataaacgattggcttcgaaccttgatcagaaggccgcttcacaccaatgggagcgtctcgtaatcgcaggggacaaagaaacagccgatattctcgatcagcacatgaataaaccgattgatcggatcattccaaaaaatctgttgaatgaaaacgaacataaggtgatagaagaactgttgaaggaagcataatatgacgaaaggccgggtctcaaacacccggtctttttagggcttaagtttgtctaatttctgacgaagcggacgaaaccgttgacatcaaagctgaattctcataccatttggatagtcagtaaaattgagagaggtcataagatgaatcagacagaaaacaaacctaaaagttataccggtatcgtgctgacattgaccgttctgatcaacgggttaattgcggtgctgttttttatgccgaaatcgggacaggtcagcattgccaatattcatattctgccgatgttaaatgccatttttaacagctttacttttatctttttgctggcagcgctctttatgattaagcaaaaaaatattcaagcgcataaacgctttattttggcggcgtttacgacgactctgctgtttttgatctgctatgtcgtgtaccactcgatagctgagaatactttattcggcggccacggcatcatgcgcgggatttacttctttattttaattacgcatatttgcctttctttcatcatcgtgccgcttgcgctgtttacgctgatcagaggattcagcatgcaagtggaacgccacaaaaaaatcgcgagatggacgatgccgctctggctgtatgtcagtctgacgggtgtcattgtatacttaatgatatcgccgtattattaaaaaaagccgtgctccgcgcggctttttttctgttgattgaaaaaaggcgcctcatacagggcgccttttactcttcaagcgtttcaagtgttgttacatttaaggattgttcaacggtttttgtttttgcttttactttttctgcgtacgtgtaatcaccatagcagtagggataacggaaattgtctttgttccctccgcaagtgtaaagtttcggattctttttgacctgctgctcggagtattgttttgccagttcctcagtatgtgatcctccatgttcagccacaaaatcaatatagccggctcccatgttgtagctttgtataatcgtatccaagtctacgccttttttcttgcctgtttggtacatgagagtgaattgtttgattccctgtttgatactggtttgagggtttttaatctcatttcgctttaaacccagagattctgaagactgcatgggatcatttcctcttccttttgactcctgatatatcatgccgagtacaagcgatgtatatttggtgagtcctttttcatccagctcgtcttcaacaagcggtttgtaatctgtcagccgttcaagcacgatcggcttgacatcaaacggaagacttttgagccattcattatttgaaaataacagaatgaggaagaaggaaaccatgacaaaaacacatatcatcataagacccgcggcagcgaaacagccttttttctttttctccactgtgtttcaccctcaatttcaggagcattatgactttttcattatgacacagatgaatgcgcgaaaccaagcggaaacccgtatttgaaacataaatttaaaataacggttcttttgtcaagcacaggatgtatctgcatcaattgacatttggtataattgggctacttgagaaaagaagggtgaggtatatgactgaatttcacgaatccggaaacacaaatgaccccgctgtcgatttagatgaggaaactttatttttggttgcccagacttttaaggcgctgtctgatccgaccagaatcagaattctccatttgctgtcacagggtgagcacgcggtaaatgatatcgcagaaaagctgaatttgctgcagtctaccgtttctcatcagctgcgttttcttaaaaatctgcgcctcgtcaaatcacgcagagaaggaacatccatctattattctcctgaggatgaacatgtgttagatgtgcttcagcaaatgattcaccatacgcggcacgattaaaaaacatccctgcttttgagacagggatgtcagccgtactgactgttattggtttggtctctgctcgtttttaagacataaaaagagaagccgctgtaataaactgcgatgaaataaaagatactgatggtcagcggatcggccccgaccgtttggctgtatgcctccggatgggtaaagtccgctgtgacccggtaaatttcaataacgcgataaacaaatctcgataggaataacgttaatagaataagttcaatccacaggtgagtgcgaaaatacatttttcctcggcgttcttcaaaagaaatgttccgtttagcaaacaggaccaggagccagccgcaaaaagtgccgaatataagatggccgtataaagccgggtgtgtgatgctgaaaaacgccagagctgcggccagcaatgaaaacaaaatcattcttgtataaagccagcggggtttcaaaggctgaaagccgacggaccgtttcacctttttatacagaaaaaaggcaatcattaagacagggcagatgctttgaagtgtgatatgcatggtgtggaactccccctccgttgagtagtgtatgcttatccggctggttttagtagtctgatttattcgcaggctgaaagcatcttttatcacattatgcacgtttctttttttggcataagagaatcgcccgcgcctttttcaggatttaaacataaaaatcttgaaaaactaatggtgttagttataataaaactaatgatattagttttagggggatgttgatgagaatcttacaatacggaagtgtttggcagctgactttttttccagcgcttttcccggtgaattgttatttggttgaagaagaagaaggagtaaccctgattgacgccggactgcctaacagtcataaaggaatcaaacaagcattgcggcagcttgggaagccgctgaatgacatattactcacccacgcgcacggggatcacatcggttcgcttgactcattagctgcggaatttccggatgcttccgtctgtatttctgagcgggattctttcttgctgaaaggtgacacttcattatttgagcatgaagcacaaacgccgataaaggggggagtgccgaaaaatgttcagaccgaacctgatcgcctgctgaaaggcggcgagcggatcggatctttacttgtcattcccgctcccggtcatacgccgggaagcctcgcttttaaagatatgagaaatgatatgctgatcgtcggagatgcctttcaagtacggggcggcctagctgtttcagggaagctgaaatggaaatttccgtttccggcttttgctacgtggaataaagaagaagctgtaaaaacagcaagaacgcttatcgctcatcaaccaagcagtctggccgccggacatggaaatgttctctgcaatcccgttgaaatgatgggtgaggctgctgaggaagccgaacgaagcctgccgggaggccgatcataatgtcaccgagagtcggaatgagccttgacatgatattgagagccgcagcaggcatcgctgacgaaaaagggctgaatgaagtgacgcttgcggctgttgcaaagtccttaaacgtaaaaccgccttccctttacaattttgtcaatggccttcaaggaattaaaacagagctggctgtctccggtttaactatgttatatgaaggaatggcggcctctgcagaaggactgacgggcgaaacggctttgctcagtcttgccgatgcctatatcaatttcgccgaagccaatcccgggttatatgacgcaacatttcaaaagataaaagacggccggattgagaatctgtcaagcctgcttgtagagcttgttgtcaggcagctgacagctaacggttatgcacagtctgacactgcgattcatgctgcgagaggactgaggagccttcttcacggatttgccgtgttgagaaaacagagtgcatttgaattaaccgaatcaattaaggaaagccggaagtttgcagttgttgcttttctaagaggtttgcagaagaggggacaataatattattatgtaaactaaataaaaagacgcatcctgtaaaaaggagggacaaatggattcattacaacatatcatttgtgagcggcgcacctattcacatatttttgattctcatgcacacacatactgccaaatgctctttccgctcgaaggacagctggacctggagacagaaagacgtaaaatcagattaaaacctgatcaaatgctgtatattccgcccgggcatgaacatcggttccgttctttggagcgaaatgaatgtctcgttctcgacataccggcatattttttcaaaggttcctttgaccccggcgttctgaataagcttgatcctttttggacatcgattcggtttctgctgacagaagagacaaagcagcagtcggctcattcattgagtctgcttgcagaatatattgctgaaaagatacaagaaaaccgtacgaatgattcaattgcgtatatccgccgaaatctatcaaaggcttttacaattaaagagctcgccgcaatggaacattaccacccggcgtattattccgactggtttaaaaaacagacgggaaaaagtccgcaagcttatattgctgagctccgtatgaagaaagcggaacaaatgcttattgaaacaaaatgccggctgacagacatcagccaggaggtcggctttcaaaatttgtcttcctttaccagatggtttgtcagacataagggaataacgccgcgcgtcttccgaaacacctttcaatctgataaataattctgaaaatcggttaaataaactgcttctttttttggtatcatgattgtaaaaaaggagtttttgatatggcagtcatcgaagattttatcaagcttgatcttagaataggaacggtcgtaaaagcggaagtattcccggaagcaaaggtgccggccattaagatgacaatagatttcggcgaagagatcggcatgaaacaatcaagcgcccagattacaaaacggtacgaaccgggtgatctgacgggcagacaggttaccgctattgtcaactttccgccgcggcggatcgccggatttaagtcagaagttctcgttctcggcggcatcccggaaaaaggagacgttgtcctgcttacgccagagcagacagtaccgaacggaacgaaaatcggataataaaaaaagacgtttgcagaagcaaacgtcttttgcgtattgaggcgatacaccacacgccacattcgtgtgtgccgcaagggcatgtgcatcggcttacacaattcagctcatcgctatatcaatatagcatgcggaaaggggaaatgcaagagattttttaatatatgttatatctggctttgttttgccgatccccgatctttcgtttaaggttttgtttgaaattttatgatcttgaataaagcagttcgacaaatgcaagagggaatttgagcaaactgtgacccgaagtgtgacctgggtgtgaccccaaactcactgttaagagctgttaaaaacgttgttatagcaatcaaacgtactgaaaataaagtgaatgcaaggtgtaagtgtgacctggaattaaaatccgggtctttttgtgtaaaaaaatgcatgcgaagagatcatataggcattaaatgttattactgatgtcttcatttatcttattgctaagtttctgaaccttctttttaacatttgaaacagctcttttttgaatctcatcaaagttctcctgaatatagtccatgacacttcttattaaaatttcactttcaaaattaaatatctcatttatttctgactgttcttcatctgttaggtgttggtattgaagttgcttcgcatttacttctgcagctacatcaaacctaactttagttgttttggtaattggaactgtccatccggatcctctaactgcgcctttggaaagttcatcatctttaatattcagaaaagatctgatttctggatcagtatcgggaatgtctaatacttcaaatattattttaacagtagctatactatttgctcttttgccaaactttccattctctatatttgaaattgtagcctgactcaccccaaccatgttagcgagttctgtagtagagaattgcttaaccatttttctatgagtttttattaatttagcgactttttgaatcacttgttcactcattattctgttcctccggttcgactaattttgcctttatgataacacaagtaataagttattaaaataaagtgaataaattataaattataagttaaaagatattgattaataaaattgaataagttatacttgaatcaatcccatatatccgataaaaacctataccatattccttccaattaatttataatgggatcgtatgttctatcagagcgatttaattagggggctatttcattgacagttaaagagagagaagctaagaaatcaaaagtagatgcaaaggtacgtcttgaaatgtcagatattaatgaacagtatgaacaaactgacgcattaattgatcaattaatcaatagtagctgttcgattgaacgtgaatgggcagcaatgtatcagatcaaacgtaagcaagacagaggcgaaataaacgcacatcaggcgcttaaagcaattgggaagcttgatcccaagtctcaagaaatgcgtgtattcacttacataatcccgttgtattactaccttagaatggctgaatactcaaatcttgcagaaatgtcgatgattgtagatcttgattttattgaaagcaatgaacagattaaaagctccttttataaccgtctgatggctttgttgggcgcttcagcattcagtcagaataaaatgactcaagctcgtttttattgctcatacggcattaatgtaacgaatattgatagacttgtcgcttatagctatctaactttggggaatacttatttgcttgatgattatgaaaaagcaaaagaatattacctggccggtttaaaacatactgagaataaccccttggcaaaattacagctaactagaagcctttgcttcttggaaaaccattggaatcaagagaacttttggttaaaccctgattcaaatgaagttacagatatccaagaaattgcacactatcatatcaagaaaaacaacttgcaacaggctaaagaaatattggagaacttagagcagcaaccgaatattcataatgactttggcattcacttttatctaaagggactagcttatgaagataagagattcttttatgagtctataaaacactttaagctgtccggtgatctatacagcgtacgcttacctttggataaattaagggaaatgggtgaggacgagcagattttggatttacttgccctttaaatgcgacgacgtcgtcgcttatcacttgaaaggaggtgaaaacaatatgaaaaaagtatttatcggtcttacaatcgtagcttcattggctgttggattcgttgcgggtcaacaaactacaattcacagcgcatcaggggaagaaacattccatgtggcaggttttggacgtggtgcgtaagcattacatatcaatttgaaggggtgaacgattcgttcactccttctcattacatattttcagaataaaaataaaataagtggagtgataaaagtgggaacagcagtaaaagaaatctatacaacagaagatattctgaaaaagtttattgagaaatatgatttaaacgatcaaattattgaatttatgattgaaatccaagaaacgactaaaacagattatgacgattaccctgctgtatgggacatgatctctgatttagagacggagaaatacagaacattattgcagaatagataatcatagaaaccgactcgttcaaattggatgagtcttttttaaaaggaggaagacaaatgcatagagatagaccaatcgtatcaggagaggacgcaaaacggtttctgaggaacgttagacgtgttaacgagaagattgcacgtagacgcaaaataagggagattaatcgaatgaaaaggacagggagataattccccgtcctctttttatttattcttgttatcaattgtggctttgaattctgatgtaccgcatttccagcatacataatcgcctgttttactgccattgtgatactcaacttcccatgcatgatcacaaggttggtcacctttctttttccaagtttcacgtaatttaaaaccatcatacatttccatttacaatacctcgcttcattttgtatttagagacatttgagtgtgtctctctccattcatttgtagcaggcttaacattgtaacaaatcacttttttgaaaaaatctttattcggattaatgactgctgtgaaaataaaggcaataaacggtttctgaaaccattgatattactggttttttggggggtctctcgtagaagaaaagaggtaaataatttaataaataaaataagatgatttgagtaaatgatgtagtcgaatctgtgatggaaattaacccttattgcaaataaagcaataaatcataaaaaaaagtcaactgtcccaagggtttgaggggtgtgtcccttaaaggggaagaggggtaataattaaataaaaaataaagatcatctgatcgtctgtgaagggtttgggatggtgcagacaaaaaacgattaagacagcgtagctgggttaagcgtttgtcagcatcccaaggtcttcacctatctccgtaaatgagatgttaaagtacctcatctacacatgggtaatagaacaaacctcttaaacttaaaaaataagccagtcatatcaacggtttcagagcctaagtcttaaggagaaccagaaaaataatttataaacagttatagatatacgtccgtaaagaagagcgctttacgtccggtttgtccagcaagctgtcctgcacgatggataatgtttttaatttacttgatattaatgtcaatgatatctatatagctccagaattgtttctgtggggttttatctaattggatacctaatacacccgaaacgtatttaagactctcagaagcgatgatatggtgtctgaatggggtgatgcgtgtcgttgagttctaacagtctaaatgtaaaaccatacgaaatggggatacacttaataagtattacactattaatatatatatttataataaataaaataattaatatatactcttattgtgtatatccccaaatgatatggttttacattttaggaaaatagaaagtggtctgaagtcacgtataccaaggggtgtagcatttctttcgaattttatagttgtgaaaaggtggcttgaaccattggtacacgtggcttcacaagggtttttgagataaatgccataagggatgaagaagagaaattccgcttgagtttgcactcttatttattccaacgctcttgtttctcttgtgccacaagcgtttggagcattaatcctttaaaaaagataatcgccttaaaggagagtgaaaatatacaggtgtagggtgggggtatgtaaaaaagcgataaaatagaaagtgccttaaggctatgacattactgggtttttgagtctatggttacttctgtgaagaagcaagtggctgttcatccttactctcgtaaggggttaataccccgtgagggtataaaaatacgtaatcgccataagggaaatagattctgttagcatttagaaagtgtcatgaaccctactctcccaacaggtgtagcagatttaccgaaaaaagatgagctgcaaaagagccgtgaaccattgtcacatataggctcgtgggtgatttcgagataattgtcataagggaatgaataagaatagcaagaaaatatacaataaatggatttaatggtaattgaaaaatcgaaagtagacaaatagaaactgccttcgtccttactccgccaacgggtacagcgattttaccgaaaaaatattactggaaaaagtgccctgagcccttgccccgtaagggctgaagggggttcaggagataatcgccataagggagagaaatgaatgtaacggtaataaaagttccttgaacccagtcgcatcaatggattcggcgattttatcggaaaaagttcaacaaaaaaagagccgtgaacccttgatatgactgggctgacagcctcgctatagttaatcgtcataagggaatagcaaaagaaaacaaagaatgtcctagaatagaaagtgctttgagccttactcccccaagggatagagaagatttatcgaattttgtagttatgaaaaggtagcttgaagccgtgctgtgactgggctcaaccgtgtttcagagttaatcgtcataagggaaagcttaagggaggtcgaaagcttaatttacacatgaagggttactatgacctccagatcaaatacatttctccttttattctccagcgtactagtcaatagattggtacgctatctcccttaagcttttcaattgggtagttgcagaccgccaaaggtgttcaggtgcacatgagcattggaggaaaggaacgtttcagtgggaagggaaacctttaaacagtcttaatcccactcgtttattctaaatttaagcatacttacgccatttttacttttgattataacttaagatgatcaaaccaacaattctaatctgcattgactcattaatttttaatgggtgaatggaaattggaactatgagcatgtcgtgatgacacctctccaattgaattttagttgagatgatgcgagagattaagcccgcctttataggttgaagggctttttctgcttgtgcacaaaattaaaattattggaggaaaacaaatttgattaaagtttcagagaaggttgatttaagaaatttaaaggttgtacctgggcatacgaaatatttctgtgatatcgaagaagggaaagtgtatagcaccgttacgaataaatggttaaacccacaaccaaacgatattgggtatgtaatgacaggacttaaatccgatgatgggaaaagaaaaccttattacatgcacgaaattgtaatgatggctgcatgtgaagtcactaaagacttttggcgagaaaagaatctggaaattgaccatattgatatgaataaagcgaacaattcatttgcgaatcttaaatttactacacgtgcattgcaatatgataagcgtgttaaagagaagatgagtcagagaaaattgcttactgaagatgaagtacaagaaattcgagaagcttttacatactgggaagatgcgaaattagctttctgcaagcaaatggctagtgtttatggatgtgcgtttcagacggttcaatcaatcatcaataacaaaactcacaaggtggaggctgagtaggctatgaatagattaattgctgaatctcttgcttgtcttactatggcagtcttgtgttttgtctgtggtttcttattagaaggagtaaggcttgggatactctgcgctattttttcattaatctcttctataggttattggcgaggagtgcgtgatggtgagaagaatgaacgagaaaagcaacgtattaaatggaagtcggttcgcgagcgactataaaataaacaaggacagaaaacaacatacataacagtagtggttaatcagcctgattggtgttcgatcccaatctattccctttaaaagtccatcctgttacaatttaagtaataacagtaatagggggataattatgaaaagtttcagtaaaatggttattaataatgggaatgtagttaatggtgaaggttattatgagaggtacgatgatgaattaattattaaagctgattcaggcaatatagaacaaacatttgactctttgcttgaacagagggtaattatcactagtattaagtttgaagacacaaatggggcatcaggtgcttttaatggcccttacttaatacgacgtattagtgataatgaaatcactttacaaaaataaattagcaaactaggaagatgccatttggtatcttcttttttattttaggaggagattgaatggatgataaaaagcaagaggacgtattaaagaaaaatttagagtcaacgattgaagcctttttggaaaagaactctcggtgtggtagcaaagcaggtagagaagattattggactgatgtttcgtgtaaagacatttgggatcttagagaagcttatagggcttacaagggagagaagtgagtggtaagaactaaacgaactccaagataccatactaaaagtaagccaaagacattaattgagcaagttgagatgatgctgcaaacgattaaatggattaatagtcaatatgaaaaaaaggagagaaaaagtgaatgaataagtacgctgtattttacgattattgcgatccgttcatactgttctttgatactgaagaagaagcttcaaaagaatttgaaaaccggattgaagaagacgatgaagacagtgggatcggtgtatatatggcaaaagtgattaaagtgcataatgaaagggatgaagatgaatgaataacggagaatttgttttaggtaaggtattccctatttttgaaacacttcgcaaagatggagagatatttcaaacatttattgcaggatatgagattgaatactcaacaatgtcattaaaggataatgttaagcctgaatttaaagttgatggccgcataccttttccagcctcaatgattggtaaaacctataaggaaacagtaaagaatgtgacagcaatgttaaatgctaataaacaacaatacgcatatgaagttttcggcatggagatttaatgcctcttaaacgctgtaatgctcctggctgccgatctctgattgattggtcattgtcctattgtgataagcataaggggcactcagacaaggaatacaataagaatgtacggtataacaaagataatacagagttgtattcctattatcagagcaaggaatggagattgctcagggaagaaaagaaacgtgaatcaaactatagatgtgctatgtgtgcagcagaaggcaaaaggaatttaagtgagagattagttgttcaccataagcacagagagttaagggatatactacataactatgaagctagggttgatttgaataaccttgaggtattatgtcagacacatcataatcagattacatttggagaaggggaatgagtattgaatcaagcagaagataatatgatattggcgaaggttgtacagagtaggattgagtatctatttaagcgagtagataatcgcatagatgagagcaagagcagaaggtgactgaatattgaccaagtatagaaagaaaccgattgaggttgaagcgtttcagtttggatatgagcctattccaaaatggtttaaggatgtatgtaaattatttggatatactacgtattctgatgagcaatacattgatactcttttaatccattatccaaaaaatagtgtgaagatatatagaggtgagtatgttattaaaggaattgaaggtgaagtttatccgtgtaagcctgatatcttcaagaaaacttatgatttagtggaggggaatgagtattgggatatgctacaagaccgactgtgaaagctccaaaggttcctaaaaaagagcctgtaaatccaaatgaatttgcaggtcttatacaaagaggagtgcttacagtaaacgaggttagaaagtatcacggtctttcatcaattgatggtggagattcaatcctatttagtgggaggaatactaaatgttagttgactatcaaggtttaaaggtaacagaagagaaggctgaattgttgaagaagctaaggattaaacacattcttgagcttggggaagacttcgggtatttaccgtggacttgggatggttttgaatactatgggcttgcatttgttaatgaggaacatcctaactttgttattagacattactcaagaggatatttagagagtgttgaatgtaaggaattggagaataagatagaatatttggctgattaagtccccccgacttataacggggtagtattgagtaaatttgtacatcggatgcccctcaactttacgatttttgttgatatcaaaatttgaatttttgctttttgagctaaaatgagcacaaatattatccgcatgcaaaagttgtcaatccattattacacttggatttatcggcagcttattttttatggaatcaactctttaattaactaaagcattatagatgaaaggtggtggcttaatggcaccaagaaagaaattggagaaagcactaaaaggacaaattacaaacgaggaaagagcagaacgacaagatcaagaagaaagtctatatgaatttgaaccgttgcatgcaaagccaccacactggctgtctacaatgggtaaaaatgaatggagtagactctatccgcatttaaaaacattgcctataagtgagttagatagaccactattcgctatgttttgtagttacattgcacaattccgagaagcagcaaaagatgtcgcacagaatggtcagattatgtttgagttgaacagtcaaggtaacgaagtgaagaaaaagaacccatctgtagaaatcatgaatagtacgtctaaggaaatacgtggtattgctggacagttaggattatccctagattcaaggatgagattaatgggttataaagatggtaatggttctaagaaaaaggatgcatttgccgagctggtggatgaatgattgattatgcaacactttatgctaaacaggttacagatggagaaataattgcatgcaaaaaggttaaacaagcatgtgaaagacatttaaatgatcttcaaaggtctaaaagtgatgattttccttatgaatatacaccacagaagacagaaaaggttattaaatttctagaaatgctccctgatgtatcaacaggtaagccaacaaagcttgcgctatttcagaaatttattgttgattctctgtatggatggcgagataaagaaactggttatagaaggttcactaaagcttacataagtatggctagaaaaggcggtaaatctattcttgtcgctggtattgcgctctatgaattgttatttggtgaagctcctaagtttgacagacagatttatgccacagctaactcaagagagcaagctggtacagtatttgaaaagatgattaaagctcaattaaataagattagagagcaatcgccagctataagaaaaatcactaaggttaagaataatgaaatccttcacacaagctctaatagtttaatcaaagcattatctagagatacaaagaaccacgattcattaaacgttttaattggaattctagatgagtatcatacagcttcaaacactcaaatgatggaggtcttggaatcttcacagggacagcaggatcaagggttgattattatcatatcaacggctggatttcagttaaatggcccaatgtattcaatagagtatccgtatgttacagatattcttagcgggagaaaggaaaacgacaattactttgccattgtttatgaaatggacgatgaagaagaagtaagtgacgaaagcttatggattaagagcaacccattacttggagtggactcaataagtaagaagttctataagtatttacggagaaaattaaaagaagctcaagataagaatgatattaatcctaccttggtaaaaaactttaacatttggaaatctgcatcatctgagagtctaatcaatggggaggactggaagaggtgtgctgttgaagaacctccagatataaggggaaaagaggtttatgttgggattgatatgtcaagagttgatgacttaacagctgttagctggatttaccctctaaatgataaagaagaaaggtatttcatagacagtcattcatttgtgggaacaaaatatggattggataataaaattcaacgtgacaaaattgattatcgtaaattagcagaagaaggtttctgtacgattactgataagaagtcaggaacaattaatcagaaacaaatcattgaatatattcagaatcatgttaacgaaaatgatctaattgttaaggcaattctatttgatccccataacatccaactcttattgaatgagttagaagactttacacagattgaggttggacaaaaagcaactcagctttctagaccaacaaagaactttcaatacttggtatatgataagaaaatgcttcatgctaataacccattattaacaatcgctgtaaataacgctttaacggttcatatcaacgatttaatcaggattgacaaggataaaaatagagaaaagattgacccaatagctgctgctattacggcgcattatgaagcaatgcatcactacactgacaatgtagatcaagattactatgcaaattacaatttttctttataaaggaggaagacatgaagcttgaaaaagttacggcggcattaatgagtgtgctcaagtttatctttatgaacttacacactcttttatttttagctgggctagtattcgttaatatcacagcctataaattttctgagttactgggttttttatcaacgggagtcctcttagtgttggttgcaataatcattaatcctaaagaagaaaggaagtgattaattggcattctttagatcaatgaatacaggaggggaatcaaatgctgtaagtgcaaatgaacaagcttttatagatatcattatgggtgcagacggtgaaacatacaccacaatcaatgcaatcaagaatagcgatatttttacagcaattcatacgcttgcttcagatatagcatcctctccaattatggttaagaataacggcattgctgatgaaatggacatcctctataaattattgaatgaaagaccgaatgagttttattcagggtattttctgaagttcattctcgtggctaatgctttgttgaacggtcaatcgtatgcagaaatcattagagattcagacggtagtcctcttgacctggttcatttgcgtaacagtgaggtatcttatgatcaaccaaacggaacgaatgaaatcatttacacatatacccctagtaatgggaaacaacggatcattaagagagagaacatgttacacattaagttcttttcattaaatggaattacaggtatttcaccgttgagcagccttaaaagggagatagaaggtcaagaagctggtaagaggctttatgttgatttctttaaacgtggagctaatctgagtgggattttaaatattaacaaagctaatttagatgaagctgcaaggaaaaacatgaagaagaattttgaaagcacgtattctggtgatcaaaatcaacaaggcattttggtacttgatgatacgatggattttaagcagttagaagttaatacaaaggtgcttgaaattgtcaataattataatcatggaacaaaacaaattgctaaagcgtttggattgccccctcataaacttggaattgaacaaaccaacacttcaattgaacaagctaaccttgattacttaaccaacaccctttcaaattactttactgcaatttctgctgagttgaactataagcttttacttttccctctgtataaccaatatacatttgaatttgatacaagaagatttagggaaacagatgcaaaaacaaagcgagaaaacactattgccttacttcagaacggcatattctcccttaatgatgctctggctcaatacggcatagcatcagttccaaatggagataagcgattcatgagcctgaattacgttgatattgaaatcatggacgagattcagaaagcaaaagcaaagagtttgcctataccttcagcatcagaaggaggtgagggaagtgagtaaaactgaaatcagattatttaatgaagacggtctggaaacccgttcagaaggggagaaagccaaggttattactggatacgccttgaagtttaacacgaaatcaaatgtgttaggtgattttgttgaaacaattgagcctggggcgttagatggtacggatatgagcgacgtaagagcacttgttgaccatgtacctagtcagatcattggaagaacaacatcaggaacactgaaattaaacgttgatgacgttggtttgcgttttgaagttacattaccaagtacacaatacgccaatgatctttatgagaatattcgtttgggtaatattacaaattgttcttttggatttcatttagctccacaaggtgctgtgagacaaaagaatccaacaaccggtgtagattttcaacgaattagaaagatatcaaagctaactgacatatcagtggttacatatccagcctacaacgatacagatgtgtttgcacgcaatctggatgaggctattaaagaatcaaatgtaaatgaaattgaaaaactgaaattccaacttgaattattaaaactaagaacccaaagcctttaaaggcttattttatttgggaaaaaggagctaatacatatgttaaaagaaaaattagaagaaacaagatccatggttgctgcaaagcgtgatgaagtaaatgcgaagattgatgaagcaaaagccaaagctgatgaaggtaatctggacgaagctaaagatatcaaagaccaggttcaagccctacaaaaagagctcgctgatcttacagcaaagctcgctgatttagaagaaattgctgggttagcaaaagaagagcctgtaacagaagaacaaaaatctaatggtggaaatgaggaaaaacgatcaatgaaacaatatgaaattattgataacccgattgaagaaatgaaacggagcgtaaacgattatatccgttcttatggacacactcgtgatggtttgaaaactgaaggtgctgaagctgtaattccagttgaagtgttaacaacgccgcaacgtgaaccagaagatgtggtagatcttgcaacaatggtaaacaagaaaactgtaaaaacagctgctggtacatacccagtcatttcaaacgcaaaagttggtcttgcttcaacagccgagcttgaaaagaacccagaactaggtaaacctgagttcatcaaagtgcgatacgatgttgagacatatcgtggcgaactagcaatttcacaagaggcaattgatgatgctggagtagatttaacatctcttgtagcagaattcttacagcaaacaaaacggatcactacaaatagagcagtagctaatgtcctaaaaaccttctctaagaagacagctgcagatactgatgggattaaacaaattcttaatgtcgatctaaaacaagcctataaacgaaatattgttatgacatcttcagcttttcaatatttagatacattgaaagacaaaaacggtcaatatattctgcaaccgaatattacttctccttctggaagtgttctattcagcaactcatttactgttgtggatgatgatttgttgggcgctaaggctggcgacatggtaatgtttatcggtgatttgaaagctgctgtattctttgcggatcgtgtcaatgttacagctaaatgggttgagaactcaatttatggacaagtcctgtcagtagctactcgttttgatgtacaacaggctgatgctaaggctggatactatgtaactatcaaaccagcaccaccagtaacagaaggcacaacaggtgcttaattgattgattagagggtcgtttatcgaaactctcttttcttatttaaaaggagtgatgcaatgacacttgaagacttgaaactctatcttagggtaaatcacaatttccacgacagtcaaattatgctccttcaagcagctgcagaaagttatgtgaaagacgctgtaaccctttctaaaaatcgtgaatcctactttatcgataaccctaaatttgatttagcaacttacatgttaattggtcattggtatgaaaatggtagtgcaacagcagagaaacagctaaatgaagttccatttggtgttattaatctcattcaacaaatgagaggagcgtatgttgatggacttcagtaggcttgatacacccatttcatttatcaaaatcaagaatggtaaagacaagaacggtgagaacgcagaagtgaaagaaacccttttctggtgttttgctgaaattaaggatcagaaactgcgggataaggttgccactcttggaacagtccttgaggacaccattacttttattgtgcgctatgatcagccaatgaaaataacaaatgacatgaaggttctttatgatgaggaactctatgaaatcaaagatgtgttaccaaactcacggaaaaaagacatgaaagacatagttgttaagaaggtgagttaatggcagaagacttacaaggatatgaagatacacaaaaggctttagataagatggctaggaaatctactaaggcggggaagattgctctgactgaagggggaaagattctggccaaggggttagaaaagaacacaccaaaggctagagatagtaaacataaaacccatatgaaagacaatgttgtttactcaaagccaaaggaagacggtgagttattcgtaagtgtgggctatgggaaagaaactgcctcacgtatacacttttcaaacttcggaacaattaaacaacctccacagcatttcatggagcgtactgaaaacgaatatgcacaagaagtgttaaatgtaattgctcaaatttattcaagggagatgggactatgaagcttccaattcaagaagttgaacaatcattgagtaataatgccgagcttacctcccttgtacctgatgagcgtatctatatggtctatgtaccggatgagcatcaagttgttgagaatgcacctatgatacgaataaatgaattagaaagttatcgcaaggactatgcagatgatgaagtacaaacgattagtgtagatattcaaattgatttatggactaagaaaattgaggaagcaagagttattcaatcaattattgatgacataatggcggacaacgattatcagcaatatgcatcagcgtttgatcgtgatcctgatattgagctatatcgctatgcaagacgttatagagcaacgaaatacataaatctcgaactataaaattataagaatggaatgataaacatatggctaaaatcggtttaacagatcttcggtatgctgttgtagacagcgaaacggagcaagtaacaacagtaacaagaattagaggggctcagagtgcaaagcttgatgtctcaaacgaaaacgaaaaaatttacgccgatgatggtgtatatgccgtaattggctcaggtattagtgatgcaaaacttgagttaggtttggcagatttgaaacaagaagacagaacgaaaattctaggaattaaagttgtagatggaattgaagagtatcacaaagacactgatcctccatacgtttgcgttacttggaaagagaagcatcataacaaagggtacatttactatgctcttttgaaagggaaattcgcaatcccatcatctgaaggtaaaacaaaagaagacaaggttagtgcacaaacagattccattgagggtcaattcatgccacgtcaaaaagatgacctggtattcctgattggtgatgatcagcatgctgattttacagtagagaaattttataaaaaggcttatggaatcacagttacagatccaacacaagatactacagtcgcactggacaagtaaattaatgaccgttagacagcctaataagctgtctattttttattcgaataaaaaacaaaactagtagataaaggtggaatttataatatggcacgtattacattgaaagattactcacaagcgaaagtaaatgaagaaggaaaaattattgaggtacctgagaaaacatatgtcgttggggtcgtaacaacacgtaaattgcgtagagcgtttgaaatcatgtctacaattcaagaaatgtctgatttagaagctaatgacgaaatgattgagtatatcgtggacgttttcaataaccaatttacagcagatgatattttagatggaatcctttctgaagactttgatgaagtcattagagatgtattagatcaagtaactggtgctgagaaaaaaaagaaacaactgaaggagaaggcgctgaaagctcaggaatagaaggtgaagaaatgacgtatgcggactatctggataagattaaccagctgtacaaagacctgatgaaagagggttataaacatcatgagatagatcaaatggatatcaatggattcttctctctcatggtgtacgagcataaggaagaaaacaagatagttccagcatacaaaattttcggtgtaaacgtgaggagataaacagggagtccgattttggactctcttttttgattttaattcttgaggaaaggaggtaaaccaatggctactgaaggaaaacccataggcagtttagttattaatgccacaatgaatgatgccggggtaaaccgaggtataacggggctaaagaataaccttaaaacagctaaaacagcaacaaacgctatggttcaggaacttaagtcggttggtgatgaacttggcgcaaacaagaagcagcttgaaggctattcaaatcaattaaagatccaagagagcattgttgaagaatacaataagtcatatcaagagcaagttaagctttatggaaaaggctcagaacaagcacagaaatatgcacaacgtttaaacactcaaatacagacttatcaatccttacagggttcgattatgcgtactgaaacaacaattaagcgacttgaacaagccgaagaaaaggcaagcaatagcacagaaaaactttcggttgatctaaaaaagaccggcgactcttcaaaagaggcacatggagatatatccaagttttcttcatttgttaaaagtgggcttgtaggagcgcttgctaaaggtacgttagctgtaggtgctttgacagcagcagtaggtggaatgggcgctaaaatggtgcttgatacacagaaaacccaaggggaatttagagcgcaactagggctgacagaggttgaagctaagaaattaaccactacagcaacagcagtatggagagacggcttcggagaaaacatggaatttgttaaagattctattggacaagtcaggcagaacataaagggtcttagtgaaaatgaattgaaacaggtcacaaaggattctattgtattagctgacacctttgatgctgatgtaaacgaagttacacgagctggtaataacattatgaagggcttcggagaatcgagcaaaaaagcgtttgatttaatgacctatggagcacaaaatggcctgaacttctcaaatgaaatgtttgacaacctttctgagtatgcaccgttattttcgaaaatgggtttctcagcgcaagaatacttccaattgttaaagaaaggaacagactctggcgtttataaccttgattacataaacgatgtaatgaaagaattccagatcagggtaaaagatggttctgattcaacatcaggagctatgggacaactgtcaggaagcactcagaaggtatggaaaagctttttaaaagggaagagtacggtcaaagacgtttcaaataaagttctaggtgaattaaaaggcatgaaaaaccaggtcaatgccaataacattggtgtcgctttgtatggtactaagtgggaagacttagaatcaaaagcgatgtactcattgggtggcatcgacgggaaaattggtcagattgatggtaaaactaaagcagcaggacaggctttacaagataattttggtgctcgtttaaagaagattggtcgaacaggtttgacagcactaatgcctttaggaaatgggctactgaacgtattagaacctgctatgaatggcttagaatcaggaatgaaagctcttgatcctgtgttcaaaagtatttcaagcgcagggaacaacattaaaaaggtgttctctggtatctttgatattttcaatggtgattctaccaaaggctcagacaagcttatggatttctttcccgtgttaacggtacagtccataattgacggcattaatagcataaagaactcgtttaatgggttgaaaacacaggctcaaccgatcatagacagtatgaaaagtggttttgctgcaatgcaacctgtcttttcaacaataggcacaattgcatccactgtatttgccacacttgggccattaattaaacaagcattaggcggtatcatgtcgtttgtaggacagctatcagcacaatggagcacattctggaaagaaaacggaacggttatctctcaagcccttcaaaatgtttggaaagtcgttcaattcgtaatgcctgttattcttgcaatcatacagtcagtttgggggaatattaaaggcgttataactggggctatctcagttattcagggcgttatcaaagtgttctcagggttattgacgggcgacttcggtaagatgtgggaaggtattaaacaaatcttctcaggcgcaattaacatgatttggaatggtatccaattaacattcttcggtaagatacttggcggtgctaaagcgttaggcgcaggacttaaaggtattttccctaaaatgtggggttggattaaaggcgtgttcaaggatggcgcttccagcgtcgggaaattcttttcatctatgaaagacaaggcatttaagattgttagtgatatgaaacacggtatcactaagaagttttgggatattgttgacgctgctaaagaattgcctaaaaaaatgggtgatggaatcaagactatgggcggtaaagcttgggacggtatcaaggcgtttggaaatagaacactccgtggctttgggaagatcatcaatggttttactcaaggcggtattaactggatccttggaaagattggagtctcagaagataaacaaataccaaaatgggatgttcctcaatatgcaaatggtactggagctcatccaggtgggcttgcaatccttggtgatggtagaggagcaaatgcaggttcagaagcttacataacaccttcaggacacatgggattaagccctgctaaagacactctcatgaaccttccaagagggacagaagttctgtcagctagagaaactaaagccttcttatctggtatcccggcatattcaaacggaactaagaagaaagaaggaatcatctctagggtatggaatggagcaaaggcggcggctagtaaagtcaaagacattgctttagatgtgttcagttacatcagtaatccatcaaagctcattaacaaggtaattgaaaagctcggtttgaagatgcctaatttcgcaggatttgccggagattttgttaaaggttcattcaactttgttaaggacaaatctgtgggcttcattaagaatatgcttggtgaagccagtaactttggtgaaggcggtacgactgcagttaagaaatgggtagctgaagcattaaaaatcaaaggacttggttcagagtttgctggagctcttgaagcaatagcgatgaaagaatcaggcggaaatccgaatgtcgtaaatagatgggattcaaactggaaagctggacatccgtcccaaggtttaatgcaattcatcccaagtacctttaatgctcataaagagcctggatatggaaacattaagaatcctgttcaccaagtcctagcttccattaattatctgaatagcagatatggaggcattctaaatcatcccggcttaaagtcgatggccaaaggtggcaggtacattggttacgataaaggcggtctgattactcgtgatcatacagcagaagttcacagaggtgagttaatccttcctttgcgtaaatttagaaggaagcaagctcataaggtacttagtcaggctgggaatatggttggttataaaccagaaacccaacaagctacagacaataatgctctcttacaaatggttgctaagatgcagcagcaaattgacattcttcaaactcaatcaaatcagagcaaccaaatgatcgcattgttgacgcaattagtagccaaagaccctcaagtgtctctcaacatccatgatctaaacagagcccaagataaagcttatcaaagagaacgaggacaaaagtacatgattaataatttatcattaacatagggagtgattaattgaaaaagagtgatttgattattgatggaatgtttttaagcgagcatcttaaaggtgtctcgctttcttcatttcgtcctgagtcaccgtcatatgaaaggcaaacaacatttactcactcgttagtagatggaacaatgacctatcgaaaaggaaacaaggggagacttaacgacaaaaagattacggcgacctttaccattatagccagtaattcacagaaatttgatatgaaaagagatgagatatacgattatctatctcgtccagatccttattacgttatctattcaccacaacctttaaaaagatggcttgttacctgtgatgacagctattcagtatttcgggagaacggtaagaagtggaaagaatttgatgtcactttcacagccattcaaggcgctgcagaaagtgtatatgatagtacaacttcaatgaaccttgcagacaatatgtttcacttggggatgaacattggaagagactctaatcctgtgtaccatttcaagaaccgatccacgttcacagttgagaatataggtaacgtgacaatagatccttacagacacaattacaatgttgaaatgtaccttgaaggaaaagacattacaattacaaacctaactaacaatgacactgtaacattagtaggtactcaatctaagtcaaacaaattaagcttgttttcccatcacattgttaatggaacgaaagtaattgaaacaagaaatggacgctttccaacattagaaaaaggtcaaaataagtttaaaatcacaggtgctacttacagtgatattaagtttaaaacccatttttattataagtaaggtggtgaattcaattgaatcagatgtacgtgttggataggaatacaaaaacaaaatatgggctgccatttgttgagccaaaagtaaatgacaatgtgaatggtaagaaggacttgtcgttttcaattactttaaacgaagccaatcaacttgaattcaatgccttggtaggtaggaactttattttaatagatgaagtgagatttaaggaacagcagtactttattaacaccccaacaataaaacaagagggtgacgtactttcaaaagacattacagccactcacatatacgctttcagagcttcaaaacacctagttcacgataccattgaaggctataaaacgttagacgaagccctatcacattctctaaaagacagtgaatttaaatatgtaattatgaacgatgcaaagaacataaagccagttaaattagagaactttggagcgaagaaatccctagagctcatggatgagataataacgaactatggtgttgagttcattgttgataatacgacgatttatgtttataaaaaggccggtaaagagattgttaagaccctggatagcactgttaatttaaagtcgctgacaattacgattacagaagacaatacaacgactcgtgtaaaagggtatgggaaggcaaaggaagagaaagacacattaggagatgaatcattatcctataaatcaaaatccggctcatggtcttacgatgattcattaaaagcagacttcacaaagaagatcggctcatcatttacattttcgtttacgggtacaggctttaagtttaagacgttggtttcaaagcttggtggcaaatgggagttcaagattggtgataaaaagaagactatatcagtctatgaaaaggatgccaatccaactgaaaaggaatttgagatcattcgtgggcttgaaagcaaggaatacactgtaacagccacatttaaaaacagggattctaataaccctaatacaaagacagcgaagaagacagacccagtaatgtatctaatgagaggaaacatcatcactgtttacagaacatacaagaatgaagatgaaaagtatgttttccctccagttgtttacaagcatcctgatgaaaagatgtttctgattaatggtcagccttcatgggctgagactgtaacagatgattcaattaaaacgaaagaggacatggagaagctcttgaaaaccaaggtgaatccatatccagaaataacgtttgacgtggattacaatgaattattggatactgtaatggcaggtgtagagggtgttatccaagcaggagacacaataaaggtcagagcgaaaactaaattaaatgggattacatatgaagacaaaatccggataactggcaatgcctacaacccattagacttaagccagccgcaaagcttaaccgtaaatggtggatatattaaaagtcgaattgatttagaggttgaggaaaagaaacgtgccaagaatcaagagcaagcaataaagaactatgaagcacagttgaaagcaggattgaccgagataaacattataaagcaacaaagcagcacagaaacatatcaaacaacaaatacatacacatattccattgaatacgctggtggacagtggaatgtaggaagtggtgatgggtttacaactataaacaacagtacattggtattgaatactgatgatgattttgatttttcttatgtgacatgtgaattttcggcaattcttagagataaaggcattagtttattttcagattatcaagacacagataaagttttgatttcatttacccaagatggaaaaacaattgtcccaacagccgttccggatggagcgagagtaaaaatcctaattataggaacaaaatagaggtgaagtaattattggtttacttaaataaaaagcacgaagtaatcccaaatgggaacttgtttagcatattagatagcaatgcaagattgactgagagtgggattaatcaaagcttgaacgctttaaaagtccacgtaaaggcgaggggagcccacgcagccgaccaaatcacttatggagcatttactgtagctgataaactgaagtatgacacttcaagaattgacaacctcattctaaatagtgacaaccataacataaatgagcttattgatttaagagtttcagctattgatggaaagacttttgccacagcttcaggacgatttgtttatgatgccaattattataaaaagaagttagatagaattgtccatgttgatgatttcggggctgttcctgatggtgttacagactgtacgcaagcatttaaagatgcaattggcgagggaaatgttgaagtccatttttctcctggtacatatgttggtcaaattgaagttccttctaactgtcgtttgattggcaaaggagaagatattacttatctcaaaatgcctgatgacgctcctgctggagcaatattgcttacaaatagagatcatcaagccgggaacgagggtatttatgtaaaggggattacgtttgattggaataaagaccgacaaggcggattaagagcacaaggcggaatacaatcaagctgtgtaacattcgccaatactaaatacttatggatcaagaattgtaattcaatcaatgcgggcttacatggctttgatattacagctccgtcttataatcatgacgcagtcaaggagcctgattacacagcacaaggatgtaaatacgtctggttagataattgtagagcttctaactatggtgacgatggaatcacaacacactacagtgagtatatctttattaacaactgtcactgcaccaatccatcaggtgaagcacatgataagggatcgtcaaactcaaatggaattgaagttgatgacggatcaaaaaatgtatggttaacaggtaactttacatctggaaacattagaggtgtagaagttaaggctcatacagaatggccagcatcaagaaacatccatattatcagtcatgtttctgttcgtgacgtacgttcatatgatttgagacatataggacatcacaaagcagaggatccatggagtgatactgcaagagacgtagcattagtagactgtacagcatttcagcctgtattcaatagcttgtatgagggtgttaccccaagggcattggacgtgtccgcataccaacgggtagatattcatggcttcagagcttatggagatccggattatgactataaagacaatccaattgtgtctttccaatttaaaagccgtaagattacagtcaatggtatgactataacagggtttgcgaaagcagactgtgatttacacgtagtaggtggggatcaaagaactgatgatgtaatgattagtaatctgatgattcatgattcagctccagtcggtgttgttcttggtggcggtgtttacaatattaatttatcaaatgctctcctacatacaaagggcggcacaaccggtatcacatctccgaatacgcaagcaaatttgttgtttgttagagcctacggatatactgacgctgctattttaggtggtgagaagtattctgttgtaccaaacaatgtcaaaggtggttttagagctgcatccacttcaggacacccattagacagtacgagcgctatcattgctacaacaggtggctgtaaaacaaaaggcccacgtaatgcagttattgcgtcctctggaggatcttcaactgaagcttcaaggcaagctgttatagcctcaaataactgtcacactgaaggtgagggttcatcaagaatggttgtagcttcccaagctgttaagaataacaacagttatagcattagaggaggatatggaacaggtaaagcatctacagctaatactaaatgggaaatagactcacaaaacggtaacattttaggtgttggtcgtgttgaaagtgcttcaaacttcaaagactacgctgagtattttgaatctgcagatggcaaaaagattgaaagtggataccttgtaacccttgaaggagataagattcgcaaggctttaaaaggtgatgagattctaggtgttatttccgagacagcgggcgttgtattaggtagcgccgagttttattggaatgacaggtacctaagaaatgatttcggtggattgatctatgaagaaactgaagttgaatacacagatgaggatggaaacataaaaactgaaaagaaaagccttcctaagcccaatccggactatgaccctgaattagactacacttcacgacaggagcgcgatgagtggcatattgttggtcttattggacaggtgcatgtgcgtattgatgataccgttcaagcaggtgataagattatagctaagaatggtaaaggatccaaatcagatgacaacacgggattaacagtcatgaaaattaagcagccatatgattctaataagggatatggtgtagtaatagcatttattagataaggaggtagtaacgatttataagaaatcagcatatacgtttgacattaatacagtttcacaaggtacgtatagatcagcttttaagttttcaactcaggatgttggaacagcaaagctgatttttaatttgcacaaagacgatgcgccattacctttatcagcagtgacagggaaagtaatccttgttcctgctaatggtaagaaaagagtacgggacgttacattggttgataaagtaaatggaattgctgaatatgttcttgatgaagatgaaatcaagatgtatgggttgtttcaatgtgagttagtcctggtttatagcaacaaacaagctatgtctgctcataagtttggctttgaagtaacacaaagcttaatggatcaagatattgcaccagtaggtgaatactacattgatgattttgagacgttgaaagcaaaggttattgagatttacgattcaactattcaaacgcttgacgatttaaagaagaagtttgaagacttggagaacatcgaaacaaaacagggtgctcaagaaaaggcagatgctgttcaagagaatcttgataatcatttgaatgacaagaaaaacccacatggtgtaacaaaagcgcaaatagggttatcagctgtaactaatgacgttcaagcaaagaaagcggattttgacaaacacacctcagatacctcaaaccctcacaaggtaactgctgcacagctcggacttgataaagttgataacgttcagcaagctactaaaagtgattttgatacacatgtgaatgatgcggatattcatgtgaataagtcatttaaggacaaagtaggggagctactacaacagttcacatcagattttaaagctaaaatggaagaattgttacaacagttcactgcacatagttttaatcaaatccgacatacctctgatgctgagcgtaagaaatggaacggagctgtcacatatgccaacatcatgctaaagaatggggctacagcagggacacgaacacctatttacgcaaaatgggggcctcttctcttattaagggggcatgtgaaaacagatccggaaatcattttcggatcaattccggttgaattcgtaccatacggaggtgcagtaaaatcagtaccgctcagcggaacaggcggaacagccaatctgataatttacgataatggtgatttgaaaataaaataccaagaccctgctgactcaagtaaggcaggtggaggctattaccttgatatagttgtgggcttggaggatggagggacagtatgattcaagtctatgaatatgatgaaaatttcattttgaccaaacccgttccgattgagcctgacgaagaaggtaactatacaatccctgaaaattgtacaaccgtccagcctccgtctttcataaaggcgatgtatcatccagctgagaagacatggacggaggcagcctcacaggaagagattgaggcaatccatcgtcaagccgaacaagaaagggagcctttgcctattgatctcttaaaggtgcaaaacgcaaaattatcgctccaagttgctgctgcagaaaaagaaaacgcccagcggcgacaacgggaggcggatacggctttgttaatcgcccagttgcaaaaacaggtcagtgaattgaaggaggggaaatagagtggcttcatatcccgagtttgcagacattaagcagttctatgattggaagtgttatacggacgccgatataagaacctatgtggaaattgaatggataacggctgatcaatttaaagagattaccggaaaagattacacttcgaacgctgaataagcgttttttattttgccctaaaagggggtgataactaaaatgaaaggaattgaattggtgttgaatattgagactttggaaatcgcaaaagcttacttatttgggggtgtaaagtatcttgatttgctgctacttctaagctttattgatgtgtttacgggagtagttaaggctgttaaagacaaatcattaagatcaagaaacgcttggtttggatacgtgcgtaagttcatgagctttgttgttgtcatcttggccaatattatagatcaaatttgcaatttaaatggcgttttggtgtttggaactgttttattttacatagcaaatgagggtctatctattatagagaacattgcacaaatgggagttaaagtccctggattcattaaagacaagttacaagtaattgaagaagacagtcaaaaagaaaagtctgttgagtaatcggcaggcttttaaatttaattaaaacggaggaatttaatatgacaatgtattactacaaacagaacatggataatatcaataaacttgcggacaacacaaaggcagctgctaaaaagctgatggattacgcagagaaaaacaaaattggcgtacttatctatgaaacaattcgttctgaagcacaacaacgtgagaatgttcgtaaaggtgcttcacagacaatgaaatcataccaccttgtaggacaagcattagactttgtaccaactggtggttattctaaatctgatactaaatggaatggttatggtgcatctgatattaagaaatttattgcttatgccaaatcaattggctttgaatggggtggggattggacaggttttgtagatcagccacatcttcaattcaactataaagggtatggtactgatacattcggcaaagcttcatctgctaaaccagttaagattgtaagaccttctaagccatcaggcatcaaatcggttggtaagatcaaaattgtcggtgtaaaaagcgctgcaatcgttatggacaaaccagaccgtaataacgctaagaacgtcggtattttggaacttggtgagacaattaacatctcaggctctgtaagaggttcaaacaatgctaagggttattgggaagtcatttatgatgggaaacggagatacatttctggtcaattcggtaaacaagtttaagtaaataaatagttcccttgaaaattttcgagggaattcttttatttatttggaaaaaagacctaaacatttgaaactattgttttagttgtcccgtatattaaggatacttatagagggggtaacaattaatggataaatatgaagaagaagaattgaaagcccgtattttaggagaaagagacatgtttgcttattatctggaagaagttttggcgaataatttgattgaaaatcccgtggcattagggattgcccgtttgattattgataagggtgctgaaggattaactgacaagcagtggtatacatttttaagacatggtgttggagacatcaattatgtcccacagtgccgaagggattatgaacaaattccttgggaagaaatgcttttagctgttcacattgaagaagatgatttatgtggctactgtagacataaagaagaaaaaggagaataaaagatggtaatcgcaaagtttgatcctcctgttggcatgtagactgcccaaacaaataaacccctcacaataatgtgaaggggtttttttaatactcgcatactttatcttcacactcaggtttccgagtggcatcgacagtaaatgaacctacttcatcatttcctttatcatagattccccagatttcttttttcttatttccattaaggaaaccattgatttcaatgccgcccattggattaatttcataatcgtcagtgtaatcaattcggtcaacatctttatagtttgttttaataaagtcagtcattctttttttagccaaagagtacaactcttctttttgctgagtttcttgggcttccatttttttgtcgtgttgttccttcataaatatccctccaagtgttataataaccagagttataaggataattatgtattttttcataaaaccatcctttctgtcttacattttacatgagggaaggggtattgtacatgaatacaaagactgacatacctaatttaactgataaagactattattttctcagtcaaaatacatacagtgaaaagaaaatgaaaaaagcctatgaaaataagactccaatcgaaaatggatcaaacaaggctttttacgtggagaaaatcaaaaaagatccagatacaggcctagatgtttacgtatttgtccaagccaagaaaaaagaaggtaaatgggtaaaaccaaaaaaaccagaaaatgtcgttgtaggttttcaaggaacaaaccaggaacaaattaaagctgatgttataagtgcagatggtggcaacgtagtaatgggtaaagacccgaaaaagaaagtccaatacataatgaaaacagatgcctctgaaaactctaaagctattgccaagtataacggtagcatagaacaagcaatgatgattaagagcggagaatacaaaattgtcactaagacatctcaatttgatcaaggtgataagcttgttgccaatgaagtgaaaaaatatgctggcactaacacagtgatttcgacaacaggtcactcacttggaggagcagatgcggaatacgctggtgtaaacaataacgtttacagtgtagcttttaataacccttccattgttaagctgcacgatgaagatacgcagaagaaaatcagaaatggcgaatttgatttgtatcataaagcaatcattaatcctgatgatatggtgggttcaggttggtttttagaatacgacagacacaacggaacaacgatatacacgaaagatccaagcatcgcacgtcaagatcgagctcaaagactaatttcttcttacggagttcctggtattttgaccaacttgattacttctttctatggccaagcatttgcaaaaaatcctgatactcatagtttaaatgattcgaattttaaatttgataagaatggtaatatccagagtgttgatggcagcaacggtgtttataaccagaatatcgaatcgttctcagcttattcaggtatgaatgggcaaaccattaaagtggatgctaagtatgcaaaggaattagctaaacgattacaggcagctatcgaagacttaaaaacaaagaaacaagcaattgaacgattccctcatgatcacagcaaaatggtttatgacgtaaaatctatttgtgggaagagattaggagaattcaaggatctagatccaagtgatgttgataaagctgtattgtttcacgcaccttatgtgaaagatggggcaacattttatgactcagaagaacattatcaaactgaggcttctcttcattatttgattagagatttagaggatattagtgagtttattgttaaaatggctgaggatttaaaagataaggataatgaattagcaagctggttacggttataagggggatttaaattgccatatggagttaatatggatgcagatgagttttacagacggttacaacagaatgaggaattaaaaaaaattgtgggttcaagtttaaaaactcattgtcagagcctaatagaagacacacaaaacgcatcagacttttcttcagcacaacaggttatagctgaagtgtatgttgctttactctcttcatttgaaggtaaagctaaggaagcattagtacaaaggcttaatgaaaatgcgactatgctgacaaatgctacagataacagaagtgcttttctgaggagtattatgactaaataattaaaacagacccttcacaagagtgaggggtctgttgtttttaatcttcttcatactttgaaacataataaacaaacttatctagatttagtggatcatactcagtccggagaactcgaacgtgcaaatctccatctgcaagccccagagtaaacctatcgcccatgcttaaatcaaactcttccccatctttacttaactctttttttgtagatttgagaagaagttttccttctttatcgttgagatcttctatgtatctaatctcaatacttgctgtgtctttcgttatatcttccccccctttaatcggtgagcttttacaataacatacattagtaccgatttgaggagagggtatttgaagatatacttcgttagtattatcttttgaagtatccttttcattcttaaatgcacctggattattttgagtccttttagctaaatatttatttaataatggagcagcaaaattataaaattctttgctgcccagaatttcatctatccaattttgtacttctgcagttacctcagttgtaattttatagttctcaattttttcctgtctgcgctttgccatacgataatcctcccacgctagattatcgttaattattatacaaattctatgcaaaaatatttccagtaaaaaagagcctattattaaggctctgataaaaccattgcaatacttttgtttaagactctgtatcttcaacctcgattaattcaacaacatcatgtaagtcacactcaagatattcacaaatctttattattgctgaaagggacacaggttcacctttagacattttagccaaagttgcagatgagatgtctacatgacttctcaggtcaactttttttaaatcctttttgataagagtaatctccattggtttataacttggtcttaatttcatagagcacctcaaacgtccattttcttaattataacatattatttgtcaatccgtttatttttagaacatttttttcaataaacgcttgactttgttttttaatagaactatactttgtttagaaatgaaacaataaattaataaaagaaacaaataattaaattaataaactgtaggtgaaaaaatgaaacacataatcattcgtggaagtgatttgggtgactttccagcaatgttgttttacaagcatttcgccgtttctggcgaagatggtcaagtgcatctatatcaagtcctgaaaaggaaggatgggaaatatgacagcatccattcagaactcttggccgaagacatcaaatacaaaaatctcagaagcttaaccaatgcagtaattgataagttgctcagtacacgattatgggatgctctcattgacaatagggagcttgttacaccggaaggctatcagattcttgataaaaacaaaacttactaaaggggataacgacaatgcaaattaaccgtcacactgtaggaactaacgtagcaagcttaggggcagaggtacaaacaaacgaacagcgtatcgaggaaatgacgaatcatttcaattacttcagaggaaaaatgttcgaagaggaaaacaacttcattgaaacatacgacgatggaaagcctaaaaagcgtttcaaaatcttcacagctatgacaataccggtttgtgttgaacttgatgcgaatgatcgaaaagatgctattgaagaattagttgaaacaggagaaatgggtgttaatttccctcatatcatgttggatatggggggaggtaaaacagttatcccaactatcacagacaatgtgttttacatagatgaaaaagcaactgtggtagaagcagatgaagttgagtaagacggatttacataacgagcggttctgtcaggttgtattcgggggattaatcgtagttgtaccagctttaagcatattatgcatagcgtggtttgggtgattaggaagagtgctggcacactctcctaatctgatgggttagtaccctcccattgtattcaaacataaataatcaacatttaagggggtgatatttcataagaaaacctcatgtaaatatgtagagagggttagcattgggacgcggcgccaactctacatgcgtcgtatcactacaatagatcagattattatcaaggggctagtgttttgcgagccccttaaaactgaatacagtcagtctatgctcctgaattaaggtgttgtctttagtgatgccttttttcgaaggctccaatatggcgccatcgccacaagtggcaacgaaagagactgcagtggaatgctctaacacacgtaaaacttgacagggtagtgactcagccgacgcaaaaaatgaggataggatgccttctgtgtttccctatttacacatgcatctgaaaggcgaaagctgccattaagtgctgacgaaggaagggtgtatcgtttctgacgatgcaggacaagccataagtatactaaacgtaaaattgcgtttagtggaacctgttagggacacttgacacagtaggcttgtttggggaataaccaacggcaaatagggtgaacacacggataccacaagttgatatacaatcaagtttcagtcgcctgcctgagtttgtttattttttttacaagcaaattcaggcagacaacttgtccagccgttgtccacagtctcaaccaatcaagcaaaaaatcaaaagaaaagtcaagacaaataacaaaagttttgatgatgaatggaggttaaagtgattgaaagtgactgtaaccaagaaggagcacgaggacttagaattgtttcacaagatgatgggagataagaggttaacaatatcacaacgaagacaggcgagaatacggtacgatatgatctataaccaagcgaaaagaagaacgctactgaatgagtacaaggggcgtttgtgaggttcatagtgaacctggcaaggtgtagttcatgatgaaccagacccttaaccctttggttaagtatatatggttattatctatatacttaaatgaagcctataaacgatagttcagcttgaaccattgtttccccagaagtggagaatgacccttaaacaacgacctttaaagacctcgttggctgggtaacaacgacctgatggaaactatcttgccatcagctgtgacgaacaatattcagtgcaggtcaaagtgaaaaccggttttaacaattgaaatacaaaaaagccggatgtttataacccgactttttgagaagaatcaaacacttttctaacgcacaatcaatgtaaataaaccggaaagtattataattgctccgcaaattgtaataaatgtgccattttttcgttgttctgatttagctgttattatccctctgattagataataaaggccgactaagattagagtccaataaaagaaagcgccatttaaggtaaaccctaatatgagaaataaaagaaccaatgctagcgatgcgtaatggaaaagcctgaatgtaagattagtcattatagacctcctagtttaaattatccttaaaatacaaataatgggttgaattgagctgaataaacctccagaattgttaatgaataacaaagggaggtattaatttaccatgaaaaagattgtcctttcaagtgttgctgttttgactgctgttacaatttttagtcctgtttcagatgcaaaagaacgtcaagccccaagcgcagttgtccagaatgttgaaccgacttatgaaactgaatctgtagattacaacggaactacgtacactttttctgaaagaactgttaatgatgtagttgagattattgtaaatgatggggaaaaaacagacaagattcaatatgaccagaatattggaaaacttgaagttaatggcgaagtggtgaattatgaagaggcttcatcacctattgaacaattggcaaataaaaacgatacatcggctgggatcttgagagatcaatggtcaggctataataatagtaaaggtacttatagtacgattagtgccagtgttgcagttcttgccgcagtctttatggctactagtatgaaaacagctaaaaaggcggcggccgttacagcagcagctggtgtcattgctgctgtaagtagtgtaaagactacagttcattggagtagattagattataagttgatgaatgccaagaaggggcaatatgagcgtagatcagatacattttttacaaactataaacataatcatcttttcaagacttcttggctctggaaaagaaaattaaaataaccttttttacgcatgaatttagttgaaatcgaattaagctatcgaaagtccactttcagaaacttggagagtggactttttgtgaacgaatcgttcagtagaagctgggtgggtgttttacccagtcagatataaggtcacagtcatggatcgtgctataattaccctaagtacgtttaccttgtgttcacttaaataggtgagcttaatgacaaagataaaaaaagatgaaaagactggcacgtattactttgtttattcaggtggaacacatccaataaccaaaaagaggattcagcgtaaacgaaaaggcatgaagacttatagagaagctgaagagaaattaaagcaggttatcattgatgttgaaaaagaaaagcagtacctgcctaagattacagatacatttgggagctatgcagaaacatggttggagagtaaaagggtcaagagatcaagcacgtacattaattataaagagatacttgactacaatgtgctgccttacctagctgattacaaatttgatgaacttacagaagagatactacagaaacaaataaacactctttattttgacaggaaagtttcaccggatggaataagaagggcagtacagttaaccaggagcatattcaagaaagcagcaagaagacgaaagcttgatgtgagcatttttgaagaattgaatttacccagtgaaaataaaagggtagatacatggacacctgaagaaataacacgctttttagatgtctcgcaaatcaaacggccatcaaggcactacattggttatgaaatatccattaaaactggaatgcgaatgggtgaagtattgggcttggaatggaaaagcatcaactgggaagaacggtatgtaaccattcgtcaaacgctatgtaagatagatgaaaaagggaattacgggttaatgccagaggttaagaccattaattcttataggaagattagtattccaaagtcactctgtgaaagtttactgaagcataagcgccttgttgaaagggataagaaagaagctggagcaaagtacaatgatcttgacttagtggtgtgtacgaaaatggggaattggctgccaccttgtaattggagaaggggatttcattcaatacgcaagcagctcggattgcctaaaattaaacctcatgcattaagacacacacatgctacgtatctaataagtatcggcgtgaatccgaaaattgtacaagaacggttaggccattctgatattaaacaaacattaggaacatacagtcatgctcttccatcaatgcaattagaagcagcagataaaatggatttattgttgaaaccgtgacctctcctgtgacctaggaaaataaaaaagcgatgagctacgctgtgtaaggctttgcagtacctcccttaacacgccacattcgtgtgtgccgcaaaggcatgtgcatcgacttacacaattcagctcatcgctatatcaatatagcatggcgggtgcggaaatgcaagagattttttaatatatgttatatctggctttgttttgccgatccccgatctttcgtgtaaggttttgtttgaaattttatgatcttgaatagcagttcgacaaatgcaaagaaaatcccggatggaacgagaaagccgtttactggtcaagaaataaaccttccttggttaaataaagaaaagtatggtgctgttgaaatagacggcaaagtaaaagttaaaggacaaattagagatgtaagccgtagagtctataccttaaaggacattgatattaatcaaaaaacttcaaaaggaaaaaccaacctggaattaatgaaagatggtaagtctccttatgctaaagacggaacacagattaacttacatcacctcatacaagaagaaagtggaccgttgcttgagatacctaatagtttacatacacagtatagcgacgtaatacatggccttaaaggtaatggagaaagcttcaggaatgatgtttacctggagaaacagtacaataactttaagacaaggtattggaagtggagagcaaaacaatatgagaaagaataaggggttataaaccatggatttttatttgaaagtaagagaattcatagctgataatgcaaaagaaaaagattttacgggtgggattggagaagataaaattttaaaaattgagcaagatcttcaagtcacgctgccagatagctacaaatggtttcttagaaactatggttctggcggggtttatggaatcgatttattaggctatgattttggcggtgcttcagttgtagaaacaaccagggaatatcatgaatataggggattgccaagtggcttagtagtcatagaacatgttgatttttttgggtattgtttagataccaataaaatcaacagtgaaggagaatgtccagttgttatttggagtgaattcggtggctataaagaacttaattctgcccattttataaagttcttttatgaaagacttcatgagatgaaagaaaactgggaagaagatgaagactgggacgattaataaaaaaaagctctcttttagagagcttttttttaggttttcaatttttaacaggctttataatgagcaaacaggcattactcaaaatactcgccgcgcctatccaaagcagccattgttttccggtcagccatgaggcagttaggataaagagtccaatggcaattgatatataattgccggctcggtccaatttacgtttgcgatgaattttatatttggcatgagaaataaattgatcaattttatctttcagctcatagcatttttccttcattttatcctctgtttcttttacttttcgataaagcatattattcatcgtctgcactcccatatcgccgttttgaaaattcagccatgattttttcttcatagtcatctgagatgaattgtgcctgatcttcaactttcaaatgtgctttttcttcaaaaccatcctgttcttcaccatcaaaacgataaagtttttgcaatagcctccagaatgtttcaatttcatcagttgtgaagtcatgaaacatatccgctaaaaaataggtggatttttctgaacaggaaattaacgctttttttccttcagcggtaatctcaatattgattgcacgtttatccagtttgcttggcacagtgtgaacatatccttttttcgcgaggcttgaaattaatttgttagcggtttgttttgttgtgcccagctttttagcgatattcataagtgtggtatcttccgtcggtaaatgggcaatagcaataagagtcatgtgctgtcgggaagtcagcatttctaagtattcgtccccccgagcctgcactttattgacaaccgaaaataatgatgcgtaactttgctgcataacatgcagttccttcattaataatttaatatccataagttatctcccaactaaatcgtcactatgttgacaattacaatatacatcgaaatggaaaataagtcaacatggtgactaatagtagcgggtgcagctgttttcaaaaatgtcacaggcagtcggagtgtttacagaaggggaaataagtataataaatgcgaaaagggcgttaatctaaagtgggaaggtgtttgacatgcagaaagtgaactggtcagaacagtttgaatggttcaataaacaagatgaaaaagacgggcgtttaatggcgctccttcgtcatgagcttacatatgaggaagtcatacggttatatatgaaagggttttatttgcaatcaaaagaaggggatgtttcgttacgtaagaacgatatccttcgtatgtttggggttgaagagaggcagggcggcaaatcttaatgaacgggaagagaaaaattcttcccgcttttcaaggcagctgttattctttttccagcatggaagtcagccattctcttaatgtattcttctgcacataccgctttccgtttctcgtgatatgcggaatgtcagaggtgtcgggcacgatttgttttgcttcttccttcgtaactcctaaataataaccaatatagaagtgcagatctttttctttaatgagaatgtggtcagtgtgttcatgaggatcaggtgatttaaagtttttcaatccgtctccgatgaaatatccggctaaagcgattccgatgccggtaatgatatccatacagcaaacctccaataaacgttatcattttttatatggtgaagccagatgaaaggattcagccttcatcaaaaccgcccggcgtttattgcggacggttttgattgctgagcttttccacctgcacctttccggagaagaaaacagcgcctccgcccatatccgccagccgatcgggcgtgagcgaattgacgagctgttttttatcatccatatcggcccaaagaccttggctgactgcaacgccgggaagcacctgttcgccgaccgaagctgttaattcacactcgccgcggtgattccaaactctaacggtttccccgtcttctatgttccggcgtacagcatcctctgtatgaataaaaagctttggcgctttttccagttttacgtgtttttcattattcgaaaatgtcgaatttaaaaaattatgattcgggcccgggacaaataaaagcggaaaatcgtcatcgctctcaagagggatatgtgtcggcagcgccggataaccgttctgtttcatcttttccgaatataattcaattcttccgctcggtgtcttgagctttcccggaaaaagcggttttttccgtttggctttcataaaggaatggcgtgagagcgcttcgtaatcaatatcctcgatatacggattgtcgggaaagtccagcgcctgtctgatcaattcttcatcggaatcctgaagctcctgctcggtaaatcccattgctccggcaagcaaacggaacacttccgtattcgatttgctgtccccgtagggttcgatcaccggtttttgcagctgaataaaatgatgccagtaagacgtgtaaaaatccgtgttttcaaaagaggatgcagcagggagcacgatatccgcatatttggcagtttccgttaaaaacagatcgtgaacgactgtaaataaatcctcacgcagcaggccttttctgactttattcgcttccggcgcaaccaccgcgggattcgtaccgtaaataaacagggagcgcacgggcggttttgtttctaacagaacgcttccgagcctgttcatattaaatgatcgtggctttttgccgtaaagcagatcaggccgctggagcgcttgtctgttatagtttaataccgcgctgttgtgcttgatcgcgcctccaccggtgttgagccactgtcctgtaacagccggtagacaggcgacggtgcggacgatcattccgccattgtcatggtgctgaatgccgtttccgatcctgataagggaaggggaggtttccccgtacattctcgcaaggcgtctgatatcgtcggctttaacgcctgtaatagcagaaactgtttccggatcatagtgttgaacatgcgcttttaattcgtcactgccttcggtgtattctgtgagaaatgcttcatcgtgaaggttttcgtcgaataagacatgcatgataccgagggcgagtgcggcatctgtgccggggcgaatgggaataaaccaatcggcaagccggccggtttggttcttatgtacatcgataacgacaattttagccccttttttccgggctttttgggcaatcatgacttggtgcatattcgtgctgacggcattgatcccccaaaaaataaagagcttcgcatgtatggtctcctccggatcagtacccgctccttcacccattgtatagttatagccttcagaaccggctttgctgcaaatcgtccgttcgagatgactcgctccgagacgatggaaaaaacggcggtccattccctctgccgccagttttcccatgttgccgtaaaagctgtacggaagaatgctttccgctccttctttggcaataagctctttccagcgcgcactgatcgtattgatcgcttcctcccaggaaataggcgcaaacgcggcttcaccttttttaccgatccgttttaacggaacggttacgcgcttctcatcataaatacgctcagccatgtgtctgactttgttgcaaatattccctgatgtgaccgggtgatcggggtctccctgaatgttaacgatttttccgtctttttttgtcacaagcaagccgcattgatcgggacagtctagtgagcataccgacttaaagaccccgttcggctgtgttgcagcagaattcatagcccatttctcctctttgtttatattgtaagcattataacatttcaaaatcgaacgtcaattcagaaaaaaagtgttgacatcacggaaagacttttctatgatgagtttattcttttaaacagcctgacaatttcataattttattttctatccagagaggtggagggactggccctatgaaacctcggcaacatttattgtgccaattccagcaagcgtatgcttgaaagataggaaagaatgatctatacatatttgtgcgcttcaagcgcataaagacggtatatgaatctctttccttctttggggaaagagatttttttatgaaaaaatttatgtgaaaaggatgttttgcaccatgacggttttaattaccgcgccatatcacgacgaggggctgaaggagctgactgagctgttcggccggactgtgcaccggccgtggaagaagcacggccgggcctatcgggaagatgaattgatacgaatgattcaagagacaaacgcgtcgggacttattactgaacttgatgaggtgtctgagcgtgttattgacatattgcccgattccgcttttatcggtgtctgcagaggaatgccgtctaatgtgaatattgcggcggcgactaaaagaaaaatccccgttttctttacaccggcccgcaatgcccaggccgttgctgaaatgtttataggaaatgtgatttcatttttgcgtcatacgtattcttcccatcagtggctgaaggacgggaagtggaatggtgattatttgcaggcttacgtcaaattcagaggaaatgagctgacggggaaaacagtcggccttatcggtttcggagctgtcggacagagaatcgcccggctattggccgcttttgactgcaaggtgctttactatgacccgtttgtccgtcatgaaaaccgggagtatgaaaaaacgacgattgaacgggtattttctgaaagtgatattgtttccgttcacttgccgcgcacagaagaaaccatcggccttatcggcgcccggcactttcaattgatgaaacaggaagctgtttttgtcaatacgtcaagagcggcggttacagacagggaagagctgctgcgggtgctgaaagaacggcggattaagggagcgatccttgacgtgttttatcacgaaccgcctgaatcttctgattatgaattgatctctttgccgaatgtgttagcgactccccatttagcgggcgcaacatttgaagtggaagatcatcatgtgaagattttaaatgaagcgcttttcaaatggaaacaagatcaaacctgctcaatacgtgaactttataacaaaagagaacttgaaacggaaggaggaggctgtaatggctgaacaaaaaggctaccttgtatttgacatcgggacggggaatgcgcgagtcgcggttgtgactgccggcggcgaagtgaccgcgcttgaaagggaagacattgaatatgtgacggatccgctttatccggacggacgatatttctcaccggaagagttatggaagcaaatcagcgctatggcaaggaaggttattggcaaaagccctcatattacattaatcggaatcacctcaacaagccagaggcagggaattgttctgatcaataaagataaaaaggcatttctcggtctgcccaacattgataacagagggcgtgaatgggaagacgggattgaggcaaaagaagaagtgcatcagcaaaccggacgtcttccgagcgctttattttccgccatgaaacttgtcggattaaaagctagacagccgtctttatggaaagaggtgaagtacatcacaagcatcagtgactgggtgacatttgagctgagcggtattttaagctatgaaccgtcacaggctgctgaaacactgctgtttgacgtaaggaaaaaggcgtggtcagagacattatgcaacatcttcggtgtgccttctgccattcttccttcactcgtccgatctgggacggttgtcggaatgttaacgtttaagaaaacggcggttctcggtctttctgaaagagtgcctgtgattgcaggcgggggagacacacagcttgccatcaaaagtgcagatgcaaagccgggagatatcgtcatcgtatccggcacaacgacgccgattacaaagataacagcggagaccggaaccgaaagtttagagaatgcatggctgaattgccatacagaagaaggtcaatggcttcttgaaacgaatccgggtgtaacaggactcaattatcaaaaattaaaatccattttttatccgaatgaatcctacggcgtcatggaacgggaaatcgcaagtctgccgaaacatgatcatgcttgtatttctgcgttaggctcctatttattgccagagaaaaacgcactggcaaaaggcggatttatttttgacgccccgctgtcccaaaacttaagcagagcccattttgtcaaagccgcactgctggaaatcgctttttcaatcaaatggaactatgaggcgttaacagaggtggcttccttttcacaagattatgtgaaggtgtgcggcggcggtttccaaagtgatgctttgacgcagtttcttgctaaccttctccaaaagaaaatctataagagagaggggttcagccaggcatccgcaatgggagcggcgatgatttgcaacgaagctctcggtgtgaaagcagagctttcgagccgcacgaaggtaattgagccggaagcggatcagacggatctcttcctatatgaagaatggaaatatacgcaaaaattatttactcattttcagccggcggtgaaagcctgacttggggatgagatgacaacatgagagattgctgaggaggaacaaaaatgcttaataaaataggaattccgaaacagctcgcctggggatttttaggggtcgtgctgtttatgatgggggacggccttgaacaaggctggctcagcccgtttttagttgaaaacggcttgacggtacagcaatcagcatccctgtttacggtttacggtatttctctcgctgtggcgtcttggttttcaggggtctgcctcgaagccttcggcgcaaagcggacgatggttatggggctgttgttttacgttatcggaacagccgcgtttatcgcatacggatttgaaaatcttaatttgccggtgatgtatgtcacgtattttattaaagggctgggttatccgctgtttgcctattcatttttgacatgggtgatttaccggtcgccgaaaaacaggctcagtacggcggtcggctggttctggattgcatattgctgcgggatgtttgtattcggtgcttggtattcaagctgggccatcaaatccttcggctatttgaatacactgtggagttcaattttctgggtctgcctcggcgcgttttttgctttgattttaaacagggaccgctttgaaaagaaaaaggcagataagcgggaaaaagcgcaggaattaatgaagggaatcaccatccttgctgaaaatccgcgcgtgctctctggggggatcattcggatcattaacagcattggtacatacggatttccggtatttcttccgatgcatatggcgcagcacggcatttctacaaatgtatggcttcaaatttggggaacgatctttctcggaaatatcgtctttaacttaatcttcggcgcagtcggtgatgccttcggctggaaaaagactgtcatgtggttcggaggagtaggctgcggcatttttacttttttattatattatgctcctgttgtatcacatgggaacttgcttttcgtcagcattgtcggttttatatggggagggctcctcgccgggttcgttccgatcggggctatcgtgccgtcggcggccggcagcgataaaggtgctgccatgtctgtgttaaatctggctgcgggcctgtcggcatttgtcggccccgcgcttgcctgggcgttcatcgggcttgtcggcgcacaaggcgttgtatggattttcgcagcgctctatttcgtaagtgcaatcttgacaaatcaaatcaaaatgcctgaagagaaaacggcaaaacacaataaagcattgcctgaatacgcttcttaacagcagcgccccgaaaattcggggcgtttttttacagctgctgaagaaacccggcaaagcgctgaatttgttcacgtaacgatagtttgttttcgtgaaattgtttgaaacgatgtccgtttgctccggacggatgcgggaagccttccagaatgaacgcatgacccattctgccgttcttcttcagcatgcggcaggctgattctgctgctttgccgagagggataagcagaatgtccttttccatcatttctatttcatccggaaaatatttcagcgcgtaacggctgagaagagctgacctgctgattgccggccgatgtcccgtatagtttttctgtttattaaaaacagggtgtttgataacggacgttgtatgaagaagctcccgttttgaatcaaataaccgggatgaatcctcaacgtgaagcgcggccggcagaccgcattcattaagcatttcgatgatgttctgtctcattgaaccggaaagtccggccgctttttttgtttcatacgatatcgtttcaagcgtttcgccatcttttaaaagctgtgccgcttttttgtaagccagctgcatttgaaaaaaaccaggtgtgattccggaaatggcaacgactgcatgagggttaatatattcattatgaggcgaataatacaaatccagatctccgtccttggctaaatggaaagccggagtcagtaaatccgattttgtaaaccctcccgaatatgatagtgctttaagctgctgcaaaaaatgcgcaagccgctcacgatcgcaaatcatgttatgcctccttgaatccgccagtttctcttagtgtcatcaaaaacgtcagatgacatgcaggctcatacatcacttttaccggcgttccagagcatcttcaggacgtgaggcgttcctttaacttcggccgcagtcgtttgcacggctgtttttttagtgagaaaatcttcctgcagttctttttgcttttgcgataacagaacggtttctgttttgatttcatcaacggacgtctgcatggacgctgctgtggtgttaatcttctttatatcaggcgctgtatttcttttaaaacgcacggcggatacgcctgcataaatgaatgcggcagccgcaacggcagcactgatatacaaaatgatgatcatctgcttttcacccctttttttcagttgataccctttacggatcgtgttgaatcattttatttgctaattgttttttttctgcttataatgtgaaatcgtacataaggacattcagaaagggtgaaagacgtggaaagcttacaaaacaaaacggctcttatcacgggtgcgggcagaggaatcggccgcgccgccgctatcgctttagccaaagaaggagtcaatatcggtttaatcggccgcacagaagcaaatgtcgaaaaggttgcggaagaagtgaaagcccttggtgtaaaggcatcattcgctgctgccgatgtaaaaaaccaaaaagaggttgaacaagccgtctcctctattaaagaagaactcggtgagattgacatcttgattaacaatgccggaatcagcaaattcggcggatttttggatcttacgcctgaagagtgggaagacatcatacaagttaatgtaatgggtgtataccacgtgacacgcgccgttcttcctgaaatgattgagagaaaatcaggagatatcattaatatttcttctacggcgggccaaagaggcgccgcggcgacaagtgcgtacagcgcttctaaatttgccgttctcggtctgactgaatctctcatgcaggaagtcagaaaacacaatatccgtgtcagcgcaatgactccgagcacggttgccagcgacatgtctattgaattaaatctgacagacggcaatccggaaaaagtcatgcagcctgaggatcttgcagaatatatggttgctcaattgaaattacatccgcgcattttcatcaaaactgccggtttgtggtcaactaatccttaaacaaaaggggacctgtcttcacgacgggtcttttttgtttccgcaaacccgaataaataggcataaaaatccgtttttgcagaaaaaagagtgaaaaagaaactgctatcagctataattaaactaaataaactatgtaccaaatgttcattaagattatttttccccgcctccaaaaaacaaatctatacaaaccaaactgtccgaacgataaaagggaaaacgggatataaagagaatatttagtacatggaataatttgttagaaggaagggtgcgcacatattgaaagaagaaaaaagaagttcaaccggttttttagtgaaacaaagagcttttttaaagctttacatgattacaatgacagagcaggaacggctttacggactgaagcttctcgaggtgctgcgttcggaatttaaacccatcggttttaagccgaaccataccgaggtgtaccgttcacttcacgaacttttggatgacgggattttaaaacaagtaaaagtgaaaaaagagggagccaaactccaggaagtcgttctctatcaatttaaagactatgaagctgcgaagctttacaaaaaacagctgaagacagagcttgaccgctgcaaaaagctgattgaaaaagccatttcagataatttttaaatcaggccggaacgcacccggcctcccgggctcaaaaggtttgtaaggtatgttctgtgattcattatacataatagcaggctcggaacaatacatatcaataaaaccttcaaacttgacatcgactcttgaagtggtaacataaaaaacgtgtgaaaaatacgaacaaaatacgaacaagggagatgttaccgatcttagatcaaaagaaagttgcttttatcggagcaggatcaatggctgaaggaatgatatcaggcatggtccgcgcaaaaaaaattcccaaccaaaacatctgcgtgacaaaccgccgcaatacagagcgactcgctgaattggaacatcagtacggaattcagggcattgcttttgacagcatgaaaaccgaagatattgatgtctttattttagccatgaagccgaaggatgccgaaatcgctctggctacgctgaaacggcgtattcaacctcatcaaattatcctgtctgttctggcaggcataacaacctcatttatacaacaatcattacatgatcgtcagcctgttgtaagagtgatgccgaacacatccagcatgatcggcgaatcggcaacagctgcggctttcggagaccaagtctcttacggttcagcaaaaaccgcggtatcccttttggaatgcctcggggaagtgtacgtgatcaaggaagatcagatggacattttcaccggcatcgcaggcagcggaccggcgtacttttattatttaatggagtttattgaaaaagcaggtgaagaagccggcttagacaaacggctgtcccgcaaaatcggcgcgcaaacgttattgggcgcagctaaaatgctgatggaaacgggtgaaaaaccggatgtgcttcgggaaaacatcacctctccaaacggcacgacggaagccggcctcgatgcgctcaggtcagaaggcggcggagaagccattgccaaagccattaaacacgcgaccgaacgttctattgagatcagcaaaacaattgaaaaaacggcagcactataatcgttaaaaaacaggagtgatacagtgacgtctcggacgaagatcaaaagagtcgcggtgaaaatcggcagcagctcactgacgagcctgcacggggaaatcagcagaagaaagctggaagcattggtggatcaaatcgcacagctgaaagacagcggctatgaagtgattttagtatcttccggcgcagtggcggcaggttatcggaagctcggatttattcagaaaccggaaagcctccctgaaaaacaggcttccgcttccatcgggcagggattattaatggaggcttattcaaagctgtttttagcgcacggttatgtcgcatcacaaattttaattacaagaagcgacttttccgatgaataccgctaccataatgtgcgcaatacgatgaacgtccttttggaacggggcattattccaattattaatgaaaatgacacggtcacagtcaatcggctgaaattcggagataacgatacactcgcagcgaaggtggcaggtttaattgatgccgacatgcttgtgattttatcagacattgacggtttatatgatgataatccgcgcagcaacccgaaagcgaaaagaatcagacatgtaagtgacatcactccggaaatagaagcaagcgcgggagatgccgggagtgaaatgggaaccggcggaatgcgttcgaaactggatgcttttaaaattgtgatggcctccggtattaaaggctttctcgggcaggccaacattccggacattctgcttcaagcggtagatgaggcggctgaaggaacttattttgaagcggaaggaaccctgccgttaaaccacaaagaacaatggcttgcatttaattccggccccgaaggcgaaattgtgatggaaaaagaaagcagccgcgatgtcgcgaacggaaatatggagctgtcaccgcaggacatcgagcagattaagggcagattcagcagcggagcggttgtcaggctgcttgatcagcagggagaagagctcggactcggcatcgtcaactattcctcagcccagctgaagacttttaaagaaatgccgcccaaacagaccgatcaatcagtcattgatccggaagcgtttgtctgccacgttgaactatccattccgatcggctgagaaagatctataaaaatatgaaaaagcccgaggcttcgttttgaagctcgggtttgttttttattgatattgttcaagtttggagaaaaattgaatgacaaaatgatagaaatcatttgcagacggagccagttcccttccttttggtttaataatgcctacggtgcgcttcacttgaggaaattcaatcggaattttgaccgtgaaccggggtgtggtttctgcaaaggtgctttcaggtaataaagtaactcccatccccgcggagactaatcctttaatggcatctaaatcctcgccttccgtcgatacaagcggcgcaaagccggcctgtctgcaagcgtcaatcgccatgttacggagaataaacccttcaggaaataaaacaaattggtcgccgcgcagatcaattaaatgaatatttttctgtttggcaagcggatggtgcagcggaacaagcgcgtaaatcttttccgtgaataagatattgcctgttatgtcggggaattccgtcggaacggggccgagcagcgccgcatctatatccctgtttcttaccgcttcgattaaaaacttataagacccctggcggagcaaaaactcaacgttcgggtattcctctttaaatgccgaaatcaccgtcggcaaaagctggcttgcaaggctcgtcggaaatcctattttgacggttccgcgattcggatcaagatattcatcaatttgttccttcgcgtaatcaattgctttcatcgccgttttaacatgttctaaaaattgtttgccaatcggcgttaatttaatatttctgccttcccgttcaaataaagtgactttcagctcttcttcaagatttgcaatctgcctgctgatagcggattgtgcgacatgcagatgatcagccgcttctgacacatgttcccgttctgctacctccataaaataccgaagctggcgtaattccattgcgttcacacctatctatctcattttgagatgtatttgatctaaattatatattgtttatattgttttgaaaacttacaattaatttaaagttgtcagattttatgaccgataattaacggaaactgatcgggggagaggaattatgacttacaatcaaatgccgaaagcacaaggtctctaccgtccggaatttgagcacgatgcatgcggaatcggcttgtatgcccatttaaaagggaaaccttcacatgacattgtcaaaaaaggactgaagatgctttgccagctggatcacagaggaggacagggcagtgatccgaatacgggtgacggcgccggcctgatggttcagatccctgatgctttttttaagaaagagtgcggagaaatgagactgccggaaaaaggccgttacggggtaggaatggtctttttctcgcaaaatgaagaggaaagaaaaaagatcgaaaaacaggtgaatgcattcattgagcaggaaggacagatcgttctcggctggagaaccgtccctgtaaatgtcggaaaaatcggaacagtggcacaaagtacttgcccatatgtgcgtcaagtatttatcggagccgcaaacgatttgaaagacagccttgcttttgaacgcaaactgtatgtcatccggaagcaggcggaaaattggggcgttcaagaacagcttgatttttacttcgcaagcttgtcaagccagactattgtttataaagggttgttaacgcctgagcaggttgacgctttttatttggatttgcaggatgaaaccttcgtatctgcattttcactcgtgcattcaagattcagcacaaatacctttcctacttgggaacgtgcccatccgaaccgctatctgattcataacggagaaatcaatacgctccggggcaacatcaattggatgagagcgagggagcagcagtttgtttcagaaagcttcggagacgatcttcacaaagtgctgccgattttaaatgctgagggcagtgactcatccattcttgataatgcgtttgaatttttcgtgatggcggggcggaaaccggcacatacggcaatgatgctgattccggaaccatggacggaaaacactcacatgtctaaagcgaaacgggctttttatgaatatcacagctctttaatggagccgtgggacgggccgaccgccatttcgtttacggacggaaaacaaatcggcgccatccttgaccgtaacggcctgcgtccggcacgttactatgtgacaaaagatgaccatattattttctcatctgaggtcggcgttattgaagtagagcaggagaacattcttcataaaaaacgtctggagcccggaaaaatgctgctcatcgacttagaagaaggccggattatttcagatgaagaagtgaaaacagaaattgccaatgaattcccatatcaaaaatggcttgaagaagaattggttcaagtgaatcctgacccggaaatccgggaagaggaacaattcgatgatcttctcgtccgtcaaaaagcgtttggctatacgtatgaagatatccagaagtatttaattcctgttattaaagaaggcaaggacccgctcggctctatgggaaatgattcgccgctcgccgttttatccgatcgcgcccaatcactgtttcattactttaaacagctgtttgcgcaagttacaaacccgccgattgacgcgatccgcgagcagcttgtgacctccacggtgacatggctcggagccgaaggcgatctgctgcatccaagtgaaagaaatgcccgccgcattaaactgtatactcctgtattatcaaacgaacagttttatgcgctgaaaacactcgtgcaccctgacattaagagccagaacatccgcgcgctgttttccgatgacctggaaaaaggcctgaaggatttgtttcagcaggcggaaaaagcgatcaaggaaggcgtatctctgttaattttatctgacagggcaatgagtaaggaattgacgccgattccgccgctcttggccgtcagtgcgctgcatcagcatttgatccgccaaggcctgcgaacaaaagcaagcattatcgttgaatccggggaagcgcgtgaagttcatcactttgcggctctcatcgggtatggtgcggatgctgtcaatccgtatttgacttacgctacgtataagcaggaaatcgatgaaggccggcttgatattccgtatgaagaagctgtcagcaaatacggaaagagcgtaacagaaggcgtcgtgaaagtgatgtcaaaaatggggatttcaactgtgcaaagttacaggggcgcccaaatttttgaagcggtcggcatcggtgaagacgttatcgccaaatactttaccggtacagcatctcagcttggcggaattgatatcgaaacgattgcgcaagaagcgaaacagcgccatcaagcggcgtacaaggatgattacagccaaactcttgagccgggtagtgaattccaatggcgaaacgggggagagcaccacgctttcaatccgaaaaccatccatactctgcaatgggcgtgccgcaagaatgattacagcttgtttaagcagtattctcatgcagcggatgaagaacgaatcggatttttacgcaatctgttcgccttcaaagaagaccgcaagcctttaaaattagaggaagttgaatcagctgcgtccatcgtgaaacgttttaaaacaggagcgatgtcattcggttcattaagcaaggaagcccatgaggctttagcgatagcgatgaacaggcttggcggaaaaagcaacagcggagaaggcggcgaggacccgaaacgtttcgttccggatgaaaatggcgacgacagaagaagtgcgattaaacagatcgcttccggccgtttcggcgtaaagagccattatctcgtcaatgcggatgaattgcagatcaaaatggcgcaaggggcgaagccgggagaaggcggtcagcttccgggcaacaaagtatatccttgggtcgcggatgtccgtggttctacaccaggtgtagggctgatctcaccgcctcctcaccatgatatttattccattgaagacttggcgcagctgattcatgatttgaaaaatgcaaatcgaagcgcgcgaatcagcgtcaagctcgtgtcaaaagccggtgtcggcacgattgcggccggtgtggcaaaaggcactgcggatgtcatcgtcatcagcggctacgatggcggaacgggcgcgtcgccgaaaacaagtattaaacatacgggtcttccgtgggagcttggtcttgcagaagctcaccaaacgctgatgctgaacggtttacgggatcgcgtggtattggaaacggacggtaagctgatgacaggccgagatgttgtaatggccgccttgctcggtgcggaggaattcggctttgccacagcgccgcttgtcgttctcggctgcgtcatgatgcgcgcctgccacttagatacatgtcctgtaggtgtcgcgacgcaaaacccggagctccgcaaaaaattcatgggcgatcctgaccatatcgtaaattacatgctgtttgtcgcagaagaagtgcgtgaatatatggcgcagttaggctttaagacgcttgatgagatgatcggacggacagacgttcttcatgttagtgaacgtgcgaaagcgcattggaaagcgggccagcttgatttatccacactgctgtaccagcctgaaggcgtacgcactttccgtacggggcaaaaccataaaatcgacgagtcgcttgatatgacggttattcttccggcggtgcaggctgcaattgaagccggtcaggaagcggaagctgaaatcaagatcaataatacaaatcgcgtagccggaaccgtgacgggaagtgaaatttctaaacgctacggagcggaaggcctgccggatgatacgatcagacttcattttaccggatcagccggacagagtttcggggcatttgttcctaaggggatgacgcttcatttgaacggggattcaaatgactacgtaggcaaagggctttcaggcggaaaaatcatcgtgaaagcgcctgatgacttcaattgtgaaactcacgataacgttattatcgggaacgtcgcattttacggagcaacaagcggggaagcgtacattaacgggcgcgccggtgaacgttttgcagtccgtaacagcggagtcaatgtcgttgtagaaggtatcggagaccacggctgtgaatacatgacaggcggccgggttgtcgttctcggcgaagtcggcaaaaacttcggggcgggaatgtcaggcggtatcgcatacgtcctgagtgatgatgccaaagcatttaaacgcaaatgcaatatggaaatgatttcatttgaaaagctgacggatgaggcggagatcaaagaagtgcaagaaatggtcaaacggcatgcggcgctgacaaacagcaaaaaagccgcagctctcctggacaattgggaaaaagccgcagaaacctttatcaaagtcattccgaaaaactataaacaaatgctcctcagcatcgaagaacaaaaagcggcgggtttatcggaagaagacgcaattatgtatgcttttgaagccaatacaaaggtcctccaaacgcctgccaaagatcaaaaacaagcggtagtacagtaagaaaggggagaggaacatggggaaaccaactggattcatggaagaaaaacgagaaaaaccggctgagcgggaccctctcactcgcttaaaggattggaaagagtattcggctccattttcagatgaagcgtcaaagcggcagggggcgcggtgtatggattgcggcacaccgttttgccaaatcggcgctgatatcaacggttttacgtccggctgcccgatttataatctgataccggagtggaatgacctcgtctatcgggggcgctggaaagaagccttggagcgccttctgaaaacgaataactttcctgaattcacagggcgggtctgtcccgctccttgtgaaggatcttgtacgctggccatttcagatccggctgtttcaattaaaaacatcgagcggacgatcattgacaaaggatttgaaaatggatggattcagccgagaattccagcgaaacgcacaggtaaaaaagtcgctgtcgtcggttcaggcccggcaggtctggcaagcgctgatcagctgaatcaagccggtcattccgtaacagtctatgagcgtgccgacagagccggcggcctgctgatgtacggcattccgagcatgaagcttgagaaaaatgtcgtcgaacgccgtattaagcttttgacgcaggaaggtatagattttgtaacaaataccgaaatcggcgttgacataacggcagatgagctgaaagaacaatttgatgccgtcattttgtgcacaggcgcccaaaagcagcgcaatctgctgattgaaggccgggaagcaaaaggcgtccattatgcgatggactatttaacactggcgacgaaaagctatttagattccaacttcaaagacaaacaatatatagacgctaaagggaaagacgtcatcgtgatcggcggaggagacacaggagctgactgcgtggcaaccgcgctgcgccaaaaagcgcgcagcgtgcaccagttcgggaaacatcctaaacttcctcagacgcgcacgaacgacaatatgtggcctgaacagccgcacgtctttacccttgaatacgcttatgaagaagcgcaggcaaagttcggcaaagacccgagagaatattcaattcagacgacaaaaatggtggccgataagcagggccgcttacaagagattcacaccattcaaatggaaaaagtcagaaacgaatacggaaagtatgaatttcatgaactgcccgggacagaaaaagtatggcctgctcagctggtgttcatcgccatcggttttgaagggacagaacagccattattgaaacagttcggtgtcgattcggcaaatcataaaattcaggcggcatatggggattataaaacgaatgttgacggtattttcgccgcaggggatgcgagaaggggccaaagcctgattgtatgggcgattaatgaaggccgggaagcagcgcgcgaagtcgacagttatttaatggggagcactgttttaccgtaaataaaggggtttatttataaaaccggctgggatcagccggtttttcgtattgaaatgaaacctccttcttcctttattggtcatataagggtaacgtggaagataacatatggatttttgttttacagagtggagagattgttttcttccgcagactgagacgatttgcaagccttgagcagtcgatcacggtgctgctgacgggctctgtttgtctgcagtcgatttgtgggcagattttaattgataaagaaaaacatattgaatttcaagcagaagcgcttataaacaaataagggaacggacgggtccgctcctccttttttagacatctatacgaaagccgatattgccgaactgccgtccttcccgcattctgttataagcggcagctgcttcactgagagggtacatgcggtcgataatgggacggatgccgcagcggtttatcaattccagcatatccgcgaattcctcattgcttcccattgatgtaccgagaatatgaatctgcggaaaaaatagcgagcgaataggaaatccgagctgatcgcctgaactggcgccaaatgttacgatccggccattcggtttaataatgtcaagatagtgttgaaacaaggcggggcctacaccgtcaagtatgatatctgctttttcgccattcagcgcctcattccagtcaccgtagctgtcaatcgcccggtctgcaccgtatgacagtgcggtttgttttttgttttcactgcgggaggtgacgctgactgtcgctccgatagcttttgccattaataaggcgtaagttgccacgccgcttccgatgcccggaaggataaggtgttcgcctttttttaattgtccttttgtaaataaggcgcgataagcggttaatgctgataacggcagcacgcccgcttcctcccaagtcaggtgttcgggttttaaaacggcgttttccgcaggaacgatgacataaggtgaaaatgttccgtcgctcggaccgcctaaaatatcagggacggctggtacgtcctcaacagtcttccaattcagcaccgggttgatgatgacttctgcatgcagtaaatgagaccggacgccgtgtcctatttcggttacgatccccgcgccgtctgaaccgagagtaaattcatggtttccggtttcgtggtttttcattaaaaacaaatcacgatggtttaatccggctgttttcagctttatttttacttcgccgtttcctggccttttgtcaggtgcctgcctgaaatcaaagccattttcgtgtatgataagggcattcattattcttctctcctttatgattgatgagaaagattttacaggctgtatcagctgcagtaaataaatgaaaattgatagccggctatcaataaaaatcatagcaagaaggtgcccttacatggaaagcggagacttaaagatttttcaggctgtcgcccgcaaaggaagtatttcaaaggcggcagaaagcctgcattatgttcaatcaaatgtgacaaaccggattcagcagctggaacggcaattgcaaacacagcttttttaccgcacaaatcgggggatgacgctgacgcccgcaggtgaaaacttattgaaagacgcagacagaatccttcaattgctgcatgaggcgcaaaaaacggcgcaagaggcaggcgatccgaacggcccgcttcgaatcggttctcttgaaacggcggcagccgtccatctccctcaatttttcacggagtattgcagccgctacccgaaagtacagctgtctctgtcaaccggtgatacacataccttagtgcagcacgtcttacactatgagctggacggcgcttttgtttatggaccggtcgaatacgaagatcttgagcaagtcgctgtatttcaagaagaattggtcttggtctcaaataagcgggaaggcagtttgcaagacttgttgcgagatccgattctgtattttgccgcgggctgttcgcaccgccgcaaaataaaaaacatactgaaagaagaggcagtgcccgtacataaaatcattgaattcggtacgttggaagccattattggggcggtgcaggcggggatgggggtttcctttctgcctgcatcagccgtccgttattttcaaaacaggaaaaatcttgttcttcatgagcttcctgaacagtttcgggatatgaatatatcatttatctaccggagtgatttatttttgacatcggcgtttgaagaactgctgaatggattaaaagcattaccgaacggaagatgagaaaacaggacagctgtgtacgccaatttttttcgttctggtttttcttaaaaaaactttctttttcggaaaatttatgtataataaaagaaagtttttcggataaagtatctgcaatgataaggacatgagacattttaaccggccatacagagagggaaggcacggctgagaccttcccggcacgaagaatgagcttaccgccttttgagctgtattggtgaacgaaagcagccgataccgtatagccgcgttacggcaaaaatgagccgtcacttgaagtggcgggaatttgggtggaaccgcgggtctgacacacactcgtcccttcttttgggatgagtgtgtttttatgtttatataagaaaaatggcaatgataaggacatgagacattttaaccggccatacagagagggagggcgcggctgagaccttcccggcacgaagaatgagcttaccgccttttgagctgtatcggtgaacgaaagcagccgataccgtatagccgcgttacggcaaaaatgagccgtcacttgaagtggcgggaatttgg

SEQ ID NO: 33 - DNA, 384722 bp, Bacillus velezensis
  source 1..384722: mol_type = genomic DNA
attaggcacgccgccagcgttcgtcctgagccaggatcaaactctccgataaagtagtttgactgactacgcacatcactgtgcgatttatttaaaactttgaattaacaggtacgttttgtcttgtttagttttcaaagatcattataatggagcgggtgatgagaatcgaactcacgacatcagcttggaaggctgaggttttaccactaaactacacccgcgtttgaattggcgcgcccgagaggagtcgaacccctaaccttttgatccgtagtcaaacgctctatccaattgagctacgggcgcttatcaggcgacttaactatcatactaccaatcagttatgatgtcaagcgtttttttatttctttttgaagtctttttctcgacctcgtttattatacacgtttttgagaatttgtaaagtcttttttcaaaagatcattttctcatttgtcgttatcgctttgttcatcagcgacgtttaataatataccacgcactttaaattaggtcaacacttttacgaaacttttttctcacttattattcccttctatataataaataaaaaagcaggattcctaggaaccccgcgtctattcagattacccgctcacctcggcttctgcgctattacgatctgttttttcataagcacggaagttttgttcaagctgttcgagcgacagacctttcgtttccggaagaaaccttttcacaaatataacggacgctacccctaacaggacaaaaatgaagaaggttgcagacaatccgatgtttgcgagcaggatcggaaaagttaaacccacaaggaagttcacgatccagagacagaagacagtgacccccataccaagtccccgcaatcgaagcgggaatatctccgacagcatcagccaggtcaccggagagacagccccctgctgaaaagcaaggaaagtgactgttaatgaaagaaccacataaggaagggcaggcgatcctttcagcacgacagacagaactccgatcaaaagcagcaccgcagtcgttccgatcagccccgtcatcagcatcgggcggcggccgactttgccgagaagccatattcccacaaaagtcgcgagcaccgaaatcacaccgttagcgatattgccgattaatgcggcttttgtctcgaaaccggcatcttttaaaatttgagttccataatacataattgaattcacgccggtgagctgctgcactaccgcaattccgatcccgataaacacgatgcggcgcacccacggaacggcaagatccttaaaggtcgcctgctccatctcagcttccttatgaaaggcagattcaatctcagcgagctcagacttcgctttctcttcattccttattcgccggagaacgtgcagagcatcttcttttcttcctttagaaaccagccagcgcggactttcaggaactttcagcataccgaaaaacaagaataccgccggaagggccgcgataacgagcatataacgccaagcgtgagaggtatcaccaagcacattgccgatgatagcattacacgtgaaggcaagcagctggcccgttacaatcatcaattcattttgggtaaccattctccctcggctttccgccggcgacatttcagccaaatatgccggaacggttacggatgctcccccgacggcaagccccagcagaaaacgggagatgatcataaccgatacgttaggcgccagtgtacatccaagcgtcgctgcaaagaacaaaacggcaagaataaggatatttttacgtctgccgttatagtccgacaatctcccaccgaaaaccgcgccgatcgcagcccccaagagcagggagctcgccaccatcccttcagtcaaagcggtaagattaagctggtcagcttccgccataaacggcagcgccccattaattacaccggtatcgtagccgaaaagaagtcccccgaatgtcgatactaaaatgatggttctaaaaaatgaatgctggctgctatttttattcatcttcaaatcctcctagtttttacacagagataatatcggaatattcagttatcaatatttacacctataacgtctgcatacagttctgaccgtccaaaacagttatataagaagaaaatgatccgaaagcgttatcatttatagtgattattcgctctcccctctcgccaaattgttactttatagttactttgtagtgaagttataatgatattattggcaattatgttattatcataattttaaaagcgctttcagtcaataaatatttcagaaaattttataacttacctttatattacctatttgtaatcaatttatgtttttaatcaattcattttcactatatacccaatagttaatctcctttcaataaataattgattatatattgaaaacccccaatcagcagttgggggtttttgatttattcttcgtttattgtaacgatcgttcttcctcttgcttctccttttaaaagggcaggaagcgtatccggcagctcttcaagtgtaatttccttttgaataaaggcctccagacctgcaggcttgaagtcatcagctaaacgctgccatgttttctttctagtctccatcggacagaatacggaatcgattcccaagagactgacgccgcgcaatataaacggaaagactgtagccgggagtttcgttcccgctgtcagtccgctcacagcaactgatccgccgtactgaatctggctgagaactgaagcaagcggctcacctccgaccggatcgacggccgctgcccatttttgtttttgcatcggttttaacgtgccgttatacacttcatcacggtgaatgaccgtcttcgctccgaggctcttcaaatagccgctttcatcttcttttcccgtactggcctcgacctcgtaacctaaggttgaaagaatggagacggcaaagcttccgacgccgcctgtcgctcccgtgaccagcaccttccctttttcaggagcggcatggttttcttcaagacgctggacggacaatgcggcagtgaagccggcggttccgatcgtcatggcttctttaagtgtcagaccttcaggcagcggcacaatccaatctgccggaatgcgtgccatcccgctataaccgccaaagcgggaaacacctatgccgtagcttgtcgcaatgactttgtccccctctttgaaacgggcgtcatctgaggaaacgacgattcccgctaaatcaattcccggcacgaaaggatacgacgttacaatcttgccgtcaggaatggcagccaagctgtctttataattcacccctgagtagcaaaccttaatcagcacttcaccctcgggaaggtcctgaaccgccagctcccgtacgctgactgaaaaccggtcttcacgttgatcgactactaacgctttaaattgatctgtcatcactacatctccttaaaatgaattgaatggctttggaaaagcatagaataagtttgatttgttttcaaatgtcctgccctgtgtagtatgatcaaaagtaaaaacagcgaaagagtggttacgcagcatgtctgataaacaaaacaatgataacaaaaacaaaaacaacaacagcaatcagccattaccggacattattcataccgccgttttcaaggcgccgatacaagttgtctgggatacggtctccactgcggacggcctgtctctctggtttatgccgaatgatttcacacctcaagaagacagtgagtttcagctggaatctccgttcggtccgtctccgtgcaagctgctggatattgaagcgccgtaccgcctttctttttcgtgggatacggaaggctggatcgtttcttttgtcttaaaggaaacggaaagcggagatacggaattcactcttattcacggcggatggaaagagccggaagccgtcatcaataaagtcaatcggaaaagctccgagattcacagtacgatggatcaaggatggaacgggcttgtcaacacgaaacttcgcggggcggttgaggcttaacacaaaaggacggacacgctttccgtcctttttttgatgccgatacataaaaactgactttgcaaagacactaacagaagaaccgaaaacttctttcagggggcgctgtttatgtattattacaaagaagagctgatcaatatcattaaaccggacaagccggacccggccgcggccaaggtgcttcaggaaattttaggcgggcactacggagaaatgcggacgatgatgcaatactttttccaaagctctaatttcagaggaaaagaaaaacagttccgtgacctgcttcgcggtgtatttttagaagagatcgcacacgttgaactcgtccaaagtacgatcaatgcgctgctagatgaaagcggcgctgagggccctggaaatcaggcagcagatcaggcgccgcttgacgaagcagtgaaacacgccaatccgcaccattttatcatcggggcgcaaagttctcttcctgtagacgccggcggcaatccatggaacgggtcttgggtatacaaccacgggaacctgatttccgatttattggacaatgtcgtgctggaatcaaccggcgtgctgcaaaagacgcgcatttatgaaatgagttcaaatcagacgttcagagaaacactcggttttctgatcgtccgtgacaacgcccatcaaaatgcatttacaaaagcgttggaaacactgggtgtcgaatggggcaaattatttcccgttccgaattatgatattgaaaaatacccggaatgccggaaattcgttgagatgggttatcataatacccaatttaatttcagactggatccgacacggatcggagaaattctgcagggaacgacgccgagccgaaacggcggcgaattaagtgtgtccgagcctcctaaaggtttccccgtgccggaacttcccgagcttccgaatgagcacagccccggactgaaagatatgaacttgtaacaaaaaacgcctgtttcgggcgttttttgtttttctgaatatgaggtttgaatgtgtttaaaacggggaatataagccgggagatcttgccatacggccgttattataatgtgagcacattgctgtacatacttcgtttcgaaagttgtcctaattttccagccggccggctgggtatgtttgaatgataatgggaattatgtaaagagaacaatgtcttttctaaggaggcagcgaatgtctaagcaaggaaacttccagaaaactatgtcactttttgatcttattttaatcggcatgggagccatattcggttcggcatggctgtttgccgtcagtaacgtcgcctctaaagcgggcccatcaggcgttttttcctggctgatcggcgggggaatcatcttattgatcggcttggtttatgcggaactgggcgccgcgctgccgcggaccgggggaattatccggtatcccgtatattcacacggacacctggtcggatatttaatttcctttgtcaccattgtggcatacacgagtcttatttctatagaagtcacggcagtccgccaatacgtggcgtattggtttcccggtttgaccgtaaaaggctccgattctccgacaattgccgggtggatattgcaatttgcgctgctctgcctgttcttcctcctcaattactggagtgtcaaaacctttgcgaaagcaaacttcattatctcgatttttaaatatgtcgtaccgattacggtaattgtggtactgatttttcattttcacccgggcaatatgaccgttcacggattcgcgccttttggcttcaccggaattcaggccgcgatttccacaggcggcgtcatgtttgcataccttgggctgcatccgattgtggctgtcgcgagtgaagtgcagaatccgaagcggaacattccgatcgcattgattgtctgtattatcgtttctactattatttacaccgtgctgcagctcacttttatcggggcgatcccggcggataccttgaagcacggatggccggctatcgggactgaattctcccttccgttcaaagatatcgccgttttgctcggtttggggtggctggcgacattggttattttagatgcgattttatcaccgggcggtaacggaaatatctttatgaatacgacatcacgtctcgtctatgcctgggccagaaacggaacattattcagcattttttctaaagtcaataaagaaaccgggacaccgcgtgcctccctttggctttcgttcggtctggctgttttttggacgcttccgttcccttcttggaacgctcttgtcaacgtatgctccgtcgcattgattctgtcttatgcgattgcgccgatttcttctgcggcgctgagagtcaacgcgaagaatattaacagaccgttttatttaaaagggatgagcatcatcggaccgctgtcgtttatttttacctcttatattgtatattggtccggatggcgcaccgtatcctggcttctcggttctcaaattgtcatgtttctgatctatctttgtttcagtaaatatgctcccaaagaggatgtcagcatacgccagcagctgaaatcagcatggtggatcgtcggcttttatgtcatgatgctgattttctcctatctcggctcgttcggccacggattgggcattatcagcaatccgcttgacctgattctgatcgccatcggttcgctcggtatttattactgggcaaaatatacaggactgccgaaggctatgatcgacagtgataaatgacgaatgccggaaagaagtatggtcttctttccggtatttttattttaagggatgacaaaaaagcgaacatgcgataaaatgaatgacagtcattcataaaaggaggaacccctctattggcaaaacaaagctcgggaaaatacgaaaagatcctgcaagccgcgattgaagtcatttctgaaaaaggattagacaaagcatccatttcagaaatcgtcaaaaaagccggaacggcccaaggaacgttttacttatatttttcttctaaaaacgcactgatatccgcgattgcagaaaacctgctcgacaatacgctggacaggataaaagggaaaacggacggttctgaagatttttggacgttgctggacattttggtagatgagacatttcacatcacccggcttcataaagatattatcgttctctgttattccggtcttgccatcgatcattcaatggagaaatgggaagccatttatcagccttattattcctggctggaaggcgtgatcaatacggccattgaacagggtgaggtccacagcggcattcatgtcagatggacggccagaacgattatcaacgttgtcgagaacgcggctgaacggttttatatcggctgtgaacaggatgtcgatcttgaagtatataaaaaagaaatattcagctttctcaaaagaagcttgcagaaatgattggcggagaccgatcatttttgactgctgcaaaaatgactgacattcattcataactaactgaggtgactgtatcatgtattggctgcttgtattgatagccggattgttagaagtagtttgggcgtccgccctgaagcatgcggattcgctttttgattggattggtattttccttctgattgccgtcagctttctgatgctgatccgctcttataaaaaaattccgatggctgccgcatataccgtttttgtcggaataggcaccgtcggcacatatgtaacgggcgtcattttaggcgaatcgttttcaatcgggcaaatattctttttggctttgctgttgtccggcattttaggaatgaaggtatttacgaaagaaactgaaacaaggggtgaacattaatggcatggctgctgttatttattgccggagcggaggaagttgtagcggccgttgccatgaaacatattgacggttttaaaaaaaagtggccgctgattgtcatggtaacaggctttatgctttcattcttttgcctttccggagcgatgcaggttcttcccacaggtgtcgcgtatgcggcttggaccggcatgggaagcatcggcgtttcggccgtgggcatactttggtttaaagaaaaattcaatctgtcacaattggtgtctctggggcttatcctcatcggtgtcatcggcttaaaactgacagcttgacggcctgagacagcttttcaaataaaaaacaaaggaccctaagcgggccctttgtttttttatgctgttttgatctgttctgcttttcccgctccgactccgaaaataaagatcagaacggagactgcgatcagcatgaataacggaaccgtccagccgtgcgtgatgtcatgcagcaaaccgaatacgagcggcccgaacgcggcaagcaggtatccgaatgactgggccatgccggaaagcgccgcggcttcatgaacatgccgggtccgcaggctgaagaacatcatcgccaagctgaacgcacatcctcccgcaattccgatcaaaatgacccatagcggagtgagagccgggcttccgaaaagaacgccggcaatgccgataaggaaaaataaagccgtcagtccggcgagtgcgcgctgatttttcattttagcggcagcaatcggcacgataaaagtaatcggcaggactgagaattgcattaatgaaagcatccatcccgccttacttgagctgagtccattctgctgaagaatttccggcagccaagcgatgacggtgtaaaaaataagggattgcagccccatgaacatcgtcaccttccaagcaagcggagaccgcagcagactgcttttcttctctccgtttgtcccagtcgtgcggacgggcagttcgcgtcctcgcatttgcggaatccacatgacgaacgcaatgaaagaaaggatagcccagcagccgagcgcgcctttccagcctaaccccgctgaagaggcgatcggcacgctgatgccggatgcaatcgcgccgcacagattcatagaaaccgagtagacgccggtcatgatgcctaaatttccgggaaacttatgtttaatgagactcggcagcaggacgttgcatacggcgatcgacaatcccaacaggatcgttccgaaaaagagagtgccgattccggcgatggagcgcagcagagttccggctgtcaggacaattaatgatgacagtaacacaatctcggtcccgaagcgccgggacaataaaggaacaaacggtgacagacatgcaaaggccaaaagcggcactgtcgtaatagtgccggcagccgcattggtcatgccgaggctgtcccgaattgaggaaacgagcggcccgaccgatgtcagaggcgctctaaggttggcccctatcaatatgactccgatgaccagcaatatcagttttttacgctgacttgcttgcagaatttgatgttcgtctttaattttcatgttcatcctccatgtgtattgtatctttaaatactgtgatgtattggttgacggcctccatggcctgatccggtttctgtccgataatcgcggcggcaagctgggtatggatccggatagcaggggtgatctccaacaggttatggactgacgcacaaagcgcctccgtcatatgctcgtaaagatcagaaagcatgttgttatgggccgcctgtacaatggttttgtgcagcttaatgtcggcttcggcataccgttttcgatcttcattttgcaaggccgcttcacattcatccaagcatgccttcagtgctttcaggtcttcgtcattacgcctttccgccgccaatcgtgcagcttctctttcgagtgcgtatctgacttctaatgtttcaagcaaatttgattttttaatatggcggtaaaatgccgcgccgagaacactggatgagctgacatacgtaccgctcccctgccttgtctgaagcaggccggcatgtacgagcgcccgaatggcctcacgcaatgtgtttcggctcacatcaaattgcttcattaaatccagctcagggggaatgcgcgtcccgaccggccatttatccgattgaattaacgattcaatttgcgtcaccacttgttctacgagcgacagtctgcttgttttggatatctccatcaaaacacctctgaaatttgtaggatgattctatcattgggtaatataacataaaagaaacgaagatgtaaatcagcggcaacaaaaaaagagtgagtttttctctcactcttcggcgcttttatgaacgttttatattgactgaggtcacgacaaacttgtcatgacggtggcgggaaaatgaatattcaaagggagtgccgttgtccaaaaagcctacatgctcgacttcaagtatcgggtcatccggccggcagccgagatgttgctgatcgatatcatccgacttgcacgctctgatttttctatgtgagcctgcgattttgagctgcagttcccgcgtaatatgatcatagatggaatggttgagcacctcgtcattaatgccgggtataaggctcgccggcatgtacgttttttcaagaacgtacggttcgccttcaacaattctgagccttactacataatagacgggagtcttttcatcgatggccaaatgtgcggcgacatcttgagacggaaactgcacttcaaaccggatgactttgctcttgatattctttccttttaacaaattgctcaggccgagaatttcgttgctgactacgtgaacgtgctcatcctgcatggctgattgaatgataaacgtgccgtgccctctttttctgaaaagcattccttcagccgcaagtgtatcaagcgcccgcttcatcgtcatccggctgcacccgaactccgcagcgagcgtcttttcatccgggatcggctgatctatgtcatatacactgcttttaatcctctttctcatttcgttggcgattttttcgtacttattcatcggtttcctccggctgtataatgtttgatctgtatagactccttacggttatcataaatttttttccctgcttcatcaatgacgttacagccgccgatattgaaattgaaaggatttcctcgaattttctatggaatctccctcactattatggtagaatttttgcagaaacggacacaaccgaatattgcatacattgtataacctcaatgatatggtttgagggtgtctaccaggaaccgtaaaatcctgattacaaaaattgtcccgtacactttttgtaatcaggattttttattttctaaaaaataaaaaaaggagtatctgtacatgaatttcaaagtatttctgcttgcagcatctaccatcgcagtcggattggttgaattaattgtgggcggtattcttccgcaaatcgcttccgacttagatatatccatcgtcagcgcagggcagctgatcagcgtgtttgcgctcggttatgcggtatccggcccgctgcttttggcagtgacggcaaaggctgaacgaaagcggctttatttaatcgcactgtttattttcttcctaagtaatctggtcgcttatttcagtcccaatttcgccgtacttatggtgtcacgggttctcgcttctatgagcacagggctgattgtcgttctttctttaacgattgctcctaaaatcgtggcgcctgaatacagagcgcgggcgatcggcatcattttcatggggttcagttccgcaatcgctttaggcgtgcctgtcggtattatcatcagcaatgccttcggatggcgcgttctgttcttgggaatcggcgtattatctctcgtttccatgctgattatcagcgtctttttcgaaaaaatacctgctgaaaaaatgattccgtttcgtgaacagattaagacgatcgggaccgccaaaattgccagcgcacatcttgtcaccttgtttacattggcggggcattacacactctatgcctactttgcgccttttttggaaagaacgcttcatttgagttccgtttggatcagtgtatgctactttttgttcggtctgtcagcggtatgcggcggcccgttcggaggctggctatatgaccgtttaggagcatttaaaagcatcatgcttgtgaccgtttctttcgctctgatcctgtttattcttccgctgacaacggtttctttaatcattttcctgcctgcgatggtgatctggggattgctcagctggagccttgcgccggcgcagcaaagctatttaatcaaaattgcgcctgagtcttccgatattcagcaaagcttcaacacgtccgctttgcagatcggcatcgcgctcgggtcagccatcggcggcggcgtgatcggacaaaccggttcagtcacagcaacagcctggtgcggcggtttgattgtcattatcgctgtcgcgttagctgtattctctttaacgagacccgctttgaaaagaaaatccgcataaatgtgagaccgcaaaaaagccaaaggagttccttcggcttttgcggtctttttattttgcggcagcaagctcgtcttctgtcacccatttatgattggttactttttggccgccgtcagtcggtgtatagtcgaccatatacacggttgtctttttggctgaatcaataacggcttcggcgcccttcatgcctttcatatgggatgcctcgatcacggccttgtcacccggttttaacgttttatcaccggcgcccttcagctcttcctgaatgacccatttatgatcttcgacgcgctttcctcccgtttccggagtgtaagatacactgtaaaccgttgtatcataagcaccttttacggttccttgtgcatttttcatgcctttcatatgagaagctaaaatcatgacgtcactgccgactttataagtcggattttcggccttctttaaacctttcggcaccttggatgaacctgagtgattcatgtcttcgtgagagtgcgtttctttgtctttcgctttttcgcttcctcctgaagattggctgttgcatccggcaagcgccagaacggggatcaggagaaacatgctgaataaaaatagtctcgctttcatttcaagaactcctttgcctttttgatttttcactttccctttcgttttttcagtaaaacaaaaagatggcctgtcatttctcctaattcttcaaatctctctttattgcctttcatcaggtgaaattgttcacaaaatgtacacattaatggagatgcagtataattcaattatcagataatagggggaactcatcatgaaaacgaaggtttttgcggtggtattgggcgctgttttaatgattgcggggttggttttggcagaagtttcgctttatatggaatacatcacaatgctcggagctatgattttttcttctatatttatgtcagagccgaaaagaaaatttcgcgtcatcaaaggggtttgacctttctattaccgccgtcttctcaggacggcggttttgttttgcatgtcactcaatctatccgcacagccgtttcttctgtgccgtcctgatataaaacaaaatgcggggctctgtgtgctttatcacctgcaaattcaatttcaagcggcagcgccctgacaaaataacgggtttccgtcattgggaataattcgaatggagtctgcccgtctattgtaagatacaatcggttttcttttaccgccaccgatgcatgtgtgtcatcctgaaatgagtaattgccggtaaatctgctgtaaatcgcaggatcgatatctgcttttttctgatctgccggacgtttcggaatcacgtatggctgatcaaataagatgtttacagccgcggcaattacggcttgttcaaattgatacgattgttccatattgctgagataaatcaatgttttattctggtcaatataccggatcatcagagttgaatagcccggccagcctccgtcgtgactgataaccttccctttttgacggctgttttgaatcatccagccaaatccgtatccgaattgctcttcttcattccaatagcccggtgtaaacgcttgatctttagactctttcccaatgatttcttccgtataaagagcctgatcaaacagatataaatctcttatagcggagttaacggttccgtcaccttgaatcccgtcaagaaagacgacataatcggtttcctcaagttcatccggcagcacatattctccggaatgaacatcatacacatagccatatgcatagttcggaatgttttctttactcagccttctgttataaatccgcgtatcgtgcatacgaagcggatgaaatacggcttgtttcataaattcagcaaaactcatgcctgatacaatttctataataaccgctaacaccacataccccgtattactgtaaagccactccttgcccggcgggaaataagcatccggtttatgctgcttaagcatattgatcacatcttgattaacggcaattctgtcccggtcccaatgtgttaagaacaactccatatagtccggcaatcctgacgtatgatggagtaaatgccgaatggtaatgcccggataaggaaaatcaggaagccatcgctctatcatatcgtcataacgcagcttcccttgctgctctaaaatgataacgcccaaagctgtaaacggcttcgatactgaggccaattcaaagaccgattggtcattcagcatcctctttgttttcagttctgcagcgccgaatgaaccctggtataagatgcggccgttttccgctgccaatacagcgccgtttatttcatgtctttcgtctaaagtgctgaaaagctgttcaaacgcttgttttttcttatcgttcatttcacgaacctccatatagaagctgatttactcttttatacgaacggccgctttaggagtttcaatatttttccttctcgaaacaccagtcagtatactgccgttcaggcagccgcggaggtttgatgaatgtctattattcacacaatactgtgcaggcttcaaattcaacatgcttctcgtctttatttgcaccggcaatttccatggtcgaaaacatcgcgcagacgacggctttgtattcgttcatgacggtttgaatttcaatcaggaaccgttcggatgaagccgcgtattccgttacgtactctttcattttgccgataatatcatctgcctgacggctgaagccggccgcctccaagtcactctcaaactggtttttgttgatcatataaatatgcattttttaaaggctcctttcagcggcattttgtggttatatctactgtaaaggacaggcttggataaacttttaataaaatatgaacaaaatatgaattggctcatcggcctgaccggcgggctttcggctgtactccgtttcatttggactacatgaaaaaatgacttctttactctgttaaaaacagctcatatatgatctaataccagtaaaatgtttaggaggcggcctatgtcagcagcaggaaatcggcaaaaattttgggtcatggcgatgcttatagcggtctttgccgtgttcgttttctctttttctgagaatcattcacaaaaggactggcacacggcggttgaccaggcgtcagtgaatgtcttcggccagcagatctttgaaaaaaaccgtctggcaaaaacactcgacgcacgtgaggcagaatctcttctgactcttgtgaaacttgcaaatgaagaacatcacatcatctaaaagccattataaaaagcctgtttccctttggcagaggaaacaggctttttccatgtattattgagcatgtttttgttcaataaaccggtcgatccgggccagaacatccttcatgtccgtacattctttaaagctttcattaatggcttgaatgccttgtttgtattttccgttatgcagcacttcttccgcggcaagccttaccttttcagcgcttacttcatctttttgcactgtatagcctgcatccaattcagtcaggcggcgcgcaaccatcggctggtctttatcgtgcgggatgaccaccagcggcacttgataatgaatgccttcatttacactgttcattccgccatgcgtgacaaacacgtcggcctgctccagcacttcaagctgcggcacgtacggagcgatgataaagttttccggcgcctgtttgattttcgacagatcggctttttccccggcggcaatgactacttttccttcaaaatctgagaacgcgtctatgcacagattgaaaaacgcttctgtgtccccgagcaccgttcccattgagatataaatgactttttcattctttaatgagtcaatcgggaagtcgacgcgcccttttctcttcggaaaactcggaccgataaataaatactcatctccgaatgtctcactttcgggctgaaaatatctgcttgtatagacgacgttcaattcacctgtgttgttcataaattgaaccatgctgtcaggggcgacaccgtatttgtctttcatctcggctaacagctcttcacattccctgtccggctgaaacggcacgcccgattccggatggagcggcagtattttcagacggtcttcattgaacaggaaggatgctgaagaagagatgccggggatgttgagataatcccgcaccagctctcccgcaccgaatttatcataatagacggcgtcgaattgaatgtcctctgccagccgctgcacaatatgtaaaatctccagtgacgttttgatatgaacctttaaaaatgcaagtataccggacggactgccgggatcaataggtgtcattctgagcagatcgctgtgaagatgaactttcgcccctactccttccagtctgcttttgtatttttccgttgagatataatgaacgtgatcgccccgttcgctgaaagcctttgtcatacccaaagtcgggtttacgtgtccttctgcgggaaaattgatcatcagaatatgtttcgccatttttcaaactcctttgccttttttgcgtctcttccatatccatcataaatgacgcggaaaaaatcatgcaaggaacatccgtcaggtctttatgacggttcgatgacatcggcaaaaaaagacaaggcttttcaccttgtctatcgtgatgattcgtctgtttctcccgctttgagcacgcctttcagatgttcttcatcatgcttgagatgctccgtcatatattgcacggcttttgttttatcgcccttttttatttcttcaaagactttccggtgctcatgcaggataacctccgcacggtcatcgcctttaaaattaagaactctgcaaaaatgaatcagcacattgacatgctcaagcagcatggccagccggctgttgcggctgaaatccacaaggagccgatgaaacgactcgtttaaggaaataatctcagtctctttgacgcctttattgatggcttcttccgtttcccgcagctgtttttcaatgaggtcaatttcactctcagccgcttcatcaataaccagttcgaccgccagtgattcaagtgacattctgattttataaatctcttcaacatccttaacggacaaagaataaatgacaaagccgtttcgatcgtctgccgtcaaaagcccgtccttttcaaggagccgcatggcttctctgaccggcgaccggctgactccgaaatccttggccagctgagtctcattcagccgttcacccggtttaaaaatcccgtcaaatatcatttttttcaattgggaataaaattgcagataatacgggattggcttatctaatttaaaattatccatctttcctacctcttcatacaatttaggccttattgttaccaagatcatataacagtttatctatggaagcaacattcccgagcttgtcagcatatcggaggtggcgtaatatggaattatgatgaacgacggtcgacggtctgccgtaaaccgaaaacaattcattcagaggtgacggaaacatgaaaacatacaagattgccagcataccgggggacggtgtagggaaagaaacagttccgcaagcggaacgggtgttgaacgcaatcgccgaattacatggaggcattgcctttgatttcaaatgaatgctcgattcattcggagaagaggaactgggccatctcctcttacaatctattgaaacggtcacaaacagcggcattctgactcctgatgtcggcggaaaacattcagcggaagacgtcacttccgctgttatttctcaaatcaagaacaaataaaaccgcgggcaggaaaactgcacagcggtttttttcgtctcagacgggacggaccgcgcagaaacaggccgattcacctgtgaagcccgcaatacggcctgattgattcttttctacagaaaaaaaccgctgtatatcacgaggagcatccagcatctgtttttccagtaatgcggctttctcttcagtcaggcctgcccgttcacaccagacggtaaattgaaatggtttcaaaaagcagacagcggattcaatccggaagccggctgtctccagaaaacggagccattctgtttttttccacgcccgaaagtggctctgatcccgtttcttttcaatgtcattataaaaatggtcatattcatccttttcaggtgcggtattgtcaatgagaagcagtctgccgcccggtttgacaacccgaaacgcttcatgaacaaaggctctgacatcgggaaaatgatgcgccgcgattctgcatgtgacgatatcgaaagcagcatcggaaaacggcatcttttcagcatcgcctttttcgaatgacacgttcgtccatccgtttccggttataaatgcttcagcggctgctaacatttcttccgtgaggtcatatgcgataacagagcgtacgagaggagcgagagcgttagccgtatgtccgcctcccgtcgcgatatccagcacgtccatatgcttttcggcaccggaagctgaaacgagatacgtcaaatcctctcctgcggcgtgtcctgggctagtcacatatttcgcggcgtttttggcaaattgccgctgcgcctgctgtttaattgaatcctccatgatactcgggcccccttttctttctgtttgctgccttaatcaaaataaacgggttcgtccggatgtttgagatacgcaaacatcttttcaatctgactttccgtattgcgggcgacagatagcggcggcagttccgtttccgcaaaaaagccggccgcgcttgtttctgttccctccctgagccggccgccgatgatctcgcatttgataaacactttgtaaacgtggacggcggacggcggatgggaatggcatttcttatccattacagctaacagtttaacgggctttacgtcgattcccgactcctcttttacttctttgacagcggtctcgcccggagaaatcccgatatcagcccatccgcccggcagcgcccatctgccgtcgcttttctctcttaccattaatatgctctgatctttaaaaactgccgctctgatatcaactttcggagtgggatagcccgtgtcaccggcgaatacgtctttgatgatccttttgtcgatgccggtatgatgcgccatgatatccacgcttatttttcttatttcttcaaatctctcaatatcatatatgtctttggaataagccagccccgcttgcgccgcggattgaagctgttttgcccaatctagccattttggctccattttttcaccgcccgttatgttaattgacgaaaccccctgggggcaggatattgcaccttgagagtaccggtgcccatgatccgtttctgctccttgttttctgtgtatgacggagcgaatcctgccggaaaatcagaaaaaagcaggccgatctcgtcataatggaacagggtttgtttttttacgcggcacagttttgcgaattcacccgttgtgaagtattttctgacgtcttcgctcataatgcctccttgactatacggtaaccatatcctttatgatgatcattgagaaggctgattcacaaatggcttacgcactgaaagctttaccgtctcaaaaaaagcggaagaggagtatcaagtatgacgattgaaatcagagcagtcacagaagaaaaccgtgccgatatactggcgcttcatgtaagagaaagccagacttcatttattgaaactgcggaagagtgcttacaagatgctgaggattgccggcattatcagccggccggtctttatgttaacggagaattggtcggcttttccatgtacggatggtttccggaatatgatgaggaaaatgaaaacggcagagtgtggcttgatcgtttttttattgatgaacgttatcagggacggggattgggcaagctgttgcttgatgcccttatccgccatctcgttcgaatatatgattgcagacggatttatttaagcctgtttgaagataacgtgcacgcattgcggctttatcaaaaattcggcttcttattcaatggagagctggactcaaacggggaaaaagtgatggtgaaagagctgtaaaccctctgtataaaagcgattcggcttcttgccaataccttaaatttgaggtaacataaagatattagacgacggtcgacggactacggtcgattattagaacctgatacagcggagcggaacatggtgatcaggcatctaaatggaggagaagattgtgcttattatactcgttatgtttcttctcgggattattctcgggtttatcggcgccgggggagccggttttgtcattgcacttttaactatactgtttcacgtaccgattcatacggctttaggcacctcccttgccggaatggctttcacaagtttatctggggctttcagccactaccgtgaaggcaatattcagatgaaaatcggtctcatcgtcggcgtttttgcggcattcggttcgtttttcggggcaaggcttacttcccttatccccgcagatttgctgcattacttgacggcgggcatgctgtttttatctgctctgcttattttagtccggttatttattgtaaaagaaacacaagaagattccggacagcaaagcaatctgaatatatgggtgaaagccgttgtactcggtgtcatcgcaggaatcttgtccggaacgttcggcatcggctctgccccttttatccaaatcggcttaatgattcttttacgcttatccatccgccagtcggtcggcaccaccatgcttgtcattattccgcttgcgatcggcggaggactcggttatgtgacggaaggatttgtcgattatatgctgttggttaaagtgctgatcggaacgatgtgcggcgcatatgtcggcgcgaaattcaccaacctcgtgccgaaagtcattctgaaatcagccatctttttaacaccggccatcgccggtctcatgcttttattttaaactgaaacgggaggcggccgcctcccgtttttttctgttcttcatctgttttcgaagagctttttcagctttgcttccgtttcggtatggtctaccggcgtatacacactgcagcgcagatcactgttgccctgaacctgaaatgaagtcaggttaaagaccatttttcccgccttcgcgtggcggaactcaattaatacttcgggtgccgagctgacttcgctctcattccacagcgtatgaaattccgaatacgttttctccatttcttctataaactgagaataccacgtatccgctacatactggccgtaatacgttctgaaaatggcgatgaatcctttcacaaagtgctcccagttcacggctaaacttcttaattcttttctggaaaacaatagctctatgagattccgtttttcaggaggaatttgttcaaaatctaaaaatacgtgagccgcggcctggttccatcccacgatatgacaccgcctgtccgagataatggtgggacaataacggagctcctgcaggatttttgaaagcgacgggctgataaccgcttcttcctccgcggcaaacggctgcttcacgctctcctcaatggcaagcgcgtataaataatttctctcatctttgttgagctgcagcgcatcggaaacggcgtccaatacggctgcggacactttaatgtctctgccctgctccagccacgtataccacgtggtgcttacgccggctaattgtgcgacctcttctcttcggagtccgggcgttcttctccgtgtgcccatcggcagcccggccatctgcggagaaattttggcccgctgcgtttttaaaaactctgagagcgcctgcaatcttccttctggtatcataccgaatctctcctctcttaccctggtattcattatactaggataatctacaacttgtaataggataattgcgagttacaataaatacataccgaaggaggaatgaccatgaaaagagttgtgatcaccggaatgggagtgatttcacctctcggcaatgatgtgcatacattttggaaacacctgacggaaggaacatcgggaatctctttcatcgattcgtttgatgtctccggctcaaagacaaaaatagccggtaccgtccgtgattttgacgcagaagaaagatggggcagaaaagaagcgagacggcttgaccgtttcagccagtttgctctagcggcagcggaacaggcgcttgaaagctccgggattcagctcgatcagattgaccgtgaacgcctcggcgtgtacgtcggctcgggaatcggcggcatcacgactttgattgataacgttcatactttaaatgaacggggagcgcgaaaagtgagcccgagccttgtccccatgatgatctcaaacgcggccgccgctcaaatcagcatcagattaggcgcgctcggcccctcactttctcccgtcaccgcgtgttccatcggcaatacgtcgatcggggaagcattcaacgccattcgaaatgatgacgcagatatcatgtttgccgggggagcggaagcggcgattacgaatttgtcattagccagcttcggcaatgcccacgcgctgtcagcgagaaacgaagaccccgccgcggcaagccggccgtttgacgcggatcgcgatggatttgtcatgagtgaaggcgcgggcatcttagtattggaatcattggatagcgcaatcggcagaaacgccccgatcctttgtgaggtgctcggctacggcgcgagctctgacgcctatcatatggtggcctcccatccggaaggaacgggcgcatacctggcgatgaaaaacgctttgaaaaaggcgaccgtttcagcggaagacattgatgtcgtaagcgcccatgcgacaagcacaaaagccggagatctttctgaaacgttggccatcaagacattattcggggagcttgcgtatgacattccggttacggccaacaaatcaatgctcggccacatgcttggcgcggcaggcggagttgaagccatcgctctgacagaaagcctgcgacacggcatcattccgccgacgatcaatctacagcaccctgattcggcatgtgatttggactatgtgtcagaaggaccccgccatcaatcgttaacgatcggcctttccaactcattcggctttggcgggcataattcggcgatcgtgctgaagaaatatgaatagcgggcatcaaaaaaaggagtgaatcatttcactccttttttgctttctccggttttgttgttaaggcgaaaaaagcgatggaaccgataacggatgtcgtgaacataattgcccccatcggcacggccgtcgcttcattcatccccacaagcggcgacacgatggaaccgagaagaagcggaagcatgccgagcagtgcgcttgcgcttcccgcgcggtgtccctgcttttccatcgccaatgtaaaggtgcttgtcagcgtcatgccgatcgtaatcatataaataaaaattgaaatcaccagtgccgccagcggcccgtgaatgatcgtcatgacgagcagaacggcagtcgccgtcatcgctgtaatcacgccgattctcagcaggcttttttcgtgaatgatcccgccgaaacgcccgatgataaagcttccggtaatgatcgccagaccgtttatgccgaataaaacactgaatacctgaggcgatactccgtaaatatcctgatacacgaaaggcgttccggagacatacgcaaagctcccgccgtgaataaaaccgaccgtcagcgcatagccgataaatgaccgatccttcagcaggcttcccattgtccgcacggaatttccgatggagctcggaatccgcttttccggcggcagggtttctgtcagcttgagcgcaatgatgattacaagcaaaaaaccgataaacgttaaaaagagaaaaatcgtatgccatgatgcaaacggaagcagtaaaatcgcgcctcccgtcatcggcgccaccatcggcgctacggcggtaatgaccatcagcagcgagaaaaatttagaaagctctcttcccgtaaacacatctctgacgattgcacgggataaaacgagtcctgccgaagcggtgaatccttgaagaaaacgggcaatcactagtgttacaatgttcggtgcaagtgcgcaaaacagagaaaacaacgaaaataaaaaaatacatagtaataacggttttcttcttcccttcgcgtcacttaacgggccgacaacaacctgtccgattgtcagtccgatcagacatgcggttaaactgagctggacaagcgatgcgcgggcgcttaaatcttcagcgatttcagggaaactcggcagatacatatctatattgagcggccccagtatcgcaagcattccgagaagaaaagccagcgcaagccgctccttaccggtcggattatgcagcatatcgttcccacctttcctttgtcaatctctcaaaacatttgtatattgtatcataattttttctttatttttaaaagttttcaaagggcacaaaaaaaaccaagggctgttacagcccttggtcccgggtcacacggtaaaaggttttacgcgtgtttttctttaaatgcttttgcgtattgatcagccgctataatggcatccgccacgtcgtcagccgtcacgtcaaaagcggcatgaattgtttcttcttcaatcgtcgcggcttctgccactttcataatgtcctctttagatgcgtctttcaatttgatgtcttcaagtgtgactggcagccccaagctgatataaaacgcgatataccgctcaatttcctcaagcgaacgtttttccagcgccaattgaacgagcgtgccgaatgccactttttcaccgtgggtcaagtgatggatttcaccttcaagcgcggtaaatccgttatgaatggcatgcgccgcagctaagccgccgctttcaaatcccagtccgctcagaagtgtattggcttcaaccaccgcttccaatgcgggcgtaacggctttcgctttcacagactcataagcgagatggccgtatttgaataataccgcttcacatttttccgcgatagcctctccggcgattgtcggaattccgcccgccatcgttttaccgccattggcgatgacactgcgcgcctctatccacgtcgccatcgcatcggcaatccctgatgctaaaaagcgcggcggagcttccgcgacgattttcgtatcgaccagaaccaggtcaggattcttatgatagaaacgatagttttcgaacgcgccttgttcagaatacacgacagacagcccgcttgtcggagcatccgttgaagcggccgtcggcacgataacggtatagccgtttatttcatctgatacggctttggccgtatcaagcgttttaccgccgccgactccgatgacaatagtcgcgcctgctttttctgcgatgccggcaattcttttcatttcttcctgggaggcttcgccgttgaaaaccgcctcttcagaagaaatattgcttttctttaattcagccgtcaccttgtggcccgcgatatcccatacggttttgtccgcgatgacgacggctttttcaccaacgccctccagatgtccgccgatcgtttcaattgcgttttttccctgcacgtatttggccggactgataaaaattcgttccaatgtcatcatcccttcttcgttgtctctcattacatttctcttattgatagagcagaaatgaaaactcttctgatataattcctcgttttaacttgatttaaacctcatatacactgcagaaaaatcaattttcacggcattgacaagatgtgaaggtgtctatataatcttcgatattgaagctgatcattctttactgaatgaacaaacgagattgtgaatgattcgtcttaaaaattatttagttcttctggataatttttgaggcgtttttgttttttatatatttttgactgcggaggaggtttgcacatgaagaacatttgcaaggatatactgatgattatggccggagcctttcttattgcggcgtccgtggaatttttcgtcatcccgaatcatttaggggacggcagcaccgtgggaatcgctctcgtgttatattatcttttccatatacctgcaagtattacgactctggttgtaaatttgatttttatcgggctggcttataaatttttaacgaaaaaaacgattttatacacgatactcggtacgggaatgacttctgtttttctcagcatcgtcagctttattccattcggcgtgcacgatatggtgctcgggattgtattcggcgctctgctgatgggagcggggctggcattgatctttattgctgacggatctaccggcggaaccacgcttttggcgtatttattgaattacacaaagggctttaacatctcgaaaagcatgttttatatggattgtgtcatcattttcgcatccgttttagcgatcggcctcaatcatatgctatatacgtttatattcgtttatctgtgcgccaaaatcgtcgatattgtcattgagggtttccataataaaaaagccctcaccattatgtctgaccaatacgaagaaatcgccaaagccatcacctccgagtacggaaacgcggcgacgattttttacggatacgggtattacggcagcaaagacaagcgcattatctatgttgtcattaaaaagaacgaattgctgaaaatcaaaaaacatgttcaaaaaattgacccgaaatcatttatcgttattcatgaagtaaaagaagctgtcggagggcaattcgggtttacaaacctgcccgccgccgcaaatgaaaaataaccgcctgcagtgtatagctgcaggctttttttattcggctcttccccgctcaaaggtttttacacctttcaatcgaagtagtaaatgaaaccttttttgatggaggaacataaaaaatgaatatcaaaactgaaaggctcgtaattcggacgtttgaaccggaagattggcaggatgtctatgcgtacacctcaaatccgaatgtcatgaaatacataccagaaggtgtctttaccgaagatgatgccaggaaattcgttactgaaaacagcggtgaacatgccgagaagtttcccgttttattgaaggatgaggaaacggtcattggccacattgttttttttcagtattttggcgatcatacgtatgaaatcggctgggtgtttcacccggaatatcagggcaaaggatatgcttcagaggcggcgcgcgccgtgctggcattcgggtttaacaagatgaaattacaccggatcattgcgacatgtcagccggaaaacacggcttcgcaccgggtgatggaaaagatcgggatgagacgggaaggcttttttaaaaaatgcatcccccatgataatgaatggtgggatgaatattattatgccgttttagaagaagagtgggaagtctccaatctggaataaaaaggcttataccctttgcttttacagataagtgtgtgctacactgttcgtaacaaatacgaagggatgatgggtggacaatgattaactaatcttattttgaccgtttgaaatcaaatatttcaaatcagaaaaaataggattagtctgcccattttctatacgatacgaaagctatgtaaaaatagcttatttgatcatgcacaggtacggctaatccttccaaatcaattgggaggatttttttgtcctcccttaaaagcgagggattgacatatgaaagaaatgttaaaaataagcggcatcagttatgaaatcaacagcgttcccctttttgaacagatcagcgcgagcgttcagcaaggtgacatcatcggcgttatcggcaaaaacggcgccggcaaatctttattgctgcaattgatctgcaatcaaaaagcgccgtcacaaggacagatccagatgatgcaagatgtgaacgtgtatatggtggaacaagaaacggaagcttatgattccggccatccggaacctgcggaggcagccttgttagaaaagtggaacgtgcccgcacgcgccttttcacaattgagcggcggagaaaaactgaaagcccgtcttgctaaaggtttctcctcctcaagcagccttttgttattagatgagccgacgaaccacctcgatcagcacagtttagaaatactgctaaatcagatcaagaattacaaaggcaccattatttttgtttcgcatgatcgtgcttttatagatgcagcggcgacaaaaatctgggccatcgaaggaaagaaactcattgagcataaagggaattattcaagctatatggaggtccgcaaacagagaaggctgacacagcagcgggaatatgagaatcagcagcatatgatcagacggattgaagctcaaatgaacgagctgagcgcctggtcaaaaaaagcccatgcccaatcaacgaaaatagaaggatttaaagaataccatcgcgtaaaagcaaaacgcacggacgcccagattaaatcaaagcagaagcgtcttgaaaaagagcttgaaaaagcgaaagcagaaccggttgaagcggagtatgaagtccgtttttccattgagcaccgcaaaaaagcgggaaagcgttttttagaagtaagggatgtcacaaagtcatatgacggccgaacgctttttaaaaacgtgaatttcactgtgatgcacggtgaaaagattgcgattacaggcccgaacggcagcgggaaaacaacattattgaaggtcatcctcggtcaggaaaaagcgcagggcggcatatggatttctccgtctgcaaatgtcggatatttaacccaggaagtattcgaccttccgcttgataaaacccccgaacagcttttttacaaagaaacgttcgaagcaaggggaaatgttcaatccctcatgaagcatttaggatttaccgcagcgcaatggacggaacccatcggcaagatgagcatgggagagcgggtcaaatgcaaactgatggcgtttattctggaagagaaagatgtgctgattctggatgagccgacaaaccaccttgatctgccgtcacgcgagcagcttgaagagactttggcccgatacgacggaacgctcatcatcgtatctcatgatcgttactttgtcgaaaagacgacggacatccggcttgatatctcaaacggcagcgtccaaaaacaatggaaagaatctccctccgtcagggacgatgctgaagaactgcgattaaagcttgaaaccgaacggcaggaagtcctcggaaaactcagcttcatgactccggctgataaacaatatcgtgagcttgatcaaaaattcaaagagctgacggaagaaatcaagaaattgaaatgaatgtaaaaacccgtgattgtcacgggttttgttttggaaagctcacgtatcatgaagaataatttcaaactgatttgtacaacctacgttcagattaattatgagcatggttcaggggggcgaagaatggccaaacgcattggaattacgggaaacattatggctgatcaatccggccctttcccgggttataatcgggcatatgtcaataatgattatattcagtctgtttctgaggccggcggtgtgccgtttatattgccggtgattcaagagacggcgcttttaaaggaacaggtctctcatgttgacgggatcattatgtccggcggccaggatatagacccgctgttttacggcgaagaacctttacaggctttaagaaagacctttcctgatcgggacgcctacgagaaggagctgattctcacggcggttgctttagaaaagccgattctggccatctgccgggggatgcatatgttaaacgtcacttacgggggaactttatatcaagacctgacacacgcttcgtttgctgacattaagcatgaccaagaaaaagatccgccattaaaaacccatcatgtttcttttgaaaaagggacacgtctccattccttgtttggcgattcagcgcgggtgaattcattccatcaccagatcataaaagagacggcgccttcgtttaaagccgcggcttatgcgaaagacggggccattgaagcgattgaacggacgggtgaattatttgtcgtcggcgtgcaatggcatcccgaaatgctgacaaaaaaacatgaggacatgaaaaagcttttttctcttttcatggatgcggtcagcacataaaaaaaagcagatcataacgatctgctttttcattttattcttccggtttctccggtgttttgccttgtgtcagcttatggccttcgatatccacattcggaatgatcttatccagccacttcggcaagtaccaggccgcatgtcccatcagcttcatgacactcggaatgatggtcattcttacaatgaacgcatcgaaaagaacaccgaaggtcattgccaatcccatggatttgatcatagagtctccagcgaagacaaatcccgcgaagacgaaaatcatgatcagccccgccgctgttacgacaggcccgctatgcttcaatccggcatggatggcttgtaccggattttttgttttgacatattcttctctcattctgctgacaaggaatacttgataatccatcgccagtccgaaaagaataccgattgctaaaataggcaggaaggcaagaatcgggcctttttccggaatgctcagcaagccggtgaaatgtccatcctgcaggacgaataccgataacccgagtgttgcggtcattgtcagcaaaaagccaagaacggccgcaagcggcacgagaagagaacggaaaacgacggtcagcaatacaaatgcaaacccgacaataagaatggcgaattccggaatggcatcgtttaaccgatctgaaatatcaatgttcaccgcggttgacccggtgacgagcagacggatgccgtttttgtctgacagtttccgtatatcctgcactaactctttcgttgccgtatcgttcggcccggtttcaggcactgccgtaatgatggcatagtcccctttttcgttcggcatggcaggggtgacgctcgccacattatgcaagtccttcatttctttcacggcgtcttggaatgcttcatttttattgcccttaacatcttttgcatcggcaacaattgtcagcttgccgttaaaaccttcgccgaatcctttagacaaaagatcataggcgcggcgatccggggtgtctttcgctttcattcccgcatcaggcagccccagctctaaatgcatggccggcagactgatgacggctaaaagaataatgctgaaaatgcttaacagaataggcctctttgtaacaaagcgcccccaggcattcgtgtcggcgcttttcttttctttcttcttgtttgatgtcggaatcatccgttttcctgcgaccgataacactgcgggcaccagcgttactgatgccaatacagccatcagcacactgagtgccgctgtcaatcccatggcagacatgaacggaatgccgacaacggtcaatccgcaaagcgcgacgatcacggtcagtcctgcaaaaacgacggcgctgcctgccgttcccgcggctttagcgatcgattcatttttttgtaaaccttcgcccaaaaactgacgatgcttcgtaaagataaacagcgcataatcaatcccgacggccaggccgatcattccggataatgagagactgaccgaggctatcgtaaagaactgtgtcccgattaacgtcagcgtgacgcttacgcctaatccgatcagggccgtgacaatcggcagccccgctatgactaatgaaccaaacgtaatagccagtacgacgaatgccagcacaacgccgataatttctgatacaccgccgacttcaacaccggcccccggcacatcaccgctgagctccgtctgcaggcccttgtctcctgcggcagacagactgtgtttcatatgtgaaacagacgcatctgtaatgtcatccgccgcttttttgtacgtaatatcggcatatgccactgatccgtctttagaaatggttcctgtttcaaaaggatttgcaatcgaagcgactgaatgatctgttttgatcttctttaatgtctcttcaatcgcttgtttttccgattttgacgtcaatttcttcccgtcttcagctccgaagataacccggatgcttcctttatcggggccctttgaaaattcttgttgaatcatatccattgccttttcagaaggtgtgtcaggtattgacatatcatcagaaaaagcaggttttaacgagatggcgatcacaaccgaagcgatcagtatcacgagccacgcactgatcatttttaatcgattgcgggcagaccatccccctaatttatataaaaaaccagacatcgaatactcctctccaatcattactttctgcctaattgtagttcacattcacataaaaaaaacgtacataggggcatgtacgtttgggcagtttcattatatattcagtttcagaatgcctttttgcatggcaatggtgacggcttccgtccgcgaatcagcgcctaatttgttataaatcgatgttaatctcgcttttaccgtccgctctgagattcctaaatcgaaggcgatcgctttgcttttatgtcctttcgcaacggcttctagaactatgatttccttgtccgtcagctgtgtttcattggcatttgcccgttccattttcttttcccggaaacgccgcaagatgtccggctgcagaagcacttctcccctgactgccgcatccatcgtatgaaataaggtttctgagcttgtgtccttcagcagataaccgttcgcgcctgattcaatgccttctatcatcagatgatcttcattataggtcgtcaaaataataatcggcacatcagaatgctcttttatctgtttaatggcttccagcccgctcatttccggcatgtacagatccatgagaatgacatcgggttttagttcctctgcgagccggacggcggttttcccgttttccgcttctcccgttatggtgtaatggtcatttgtttctatcaaaagcttcagaccttctctgacgacaagatggtcatctgctattaacactttatacatgttccgcttctccttgaattggtatgatgatctcaatttgagttcccgctgatctggcgcttgttatacggcaagtgccgttcatcatattgacgcgttcttgtatcccaagcagcccgtaatgtccgctttttctcatttctgttccggcatcaaagcctttcccgtcatctttgacggttatgcggatctgtccctcttcttcctgaacggatacccagacattctttgcttctgcatgcttggcggcgtttgtcaggccttcaccgatcatgtaatggcaattctccgccgtatgaacgtcaagcacatgatgcacgctgtaatctaaaaaacaagacagcccggaggcttctgtaaaatggttgatttgttcagtgatgctttcttttaagaacccgatctcttctgatttgctgcgaaggttgtcaatggccgagcgcgcatcagccaatgtgcccttcactctgtccattgcctggctgatgatgtctttcgctctgtcagtgttaccctttgaaagatgaacatgcaccgcttcaagctgcatatgcaagctgaccaatccttgggcaagcgtatcgtgcaaatctctcgccatccgctgcctttcattttgaagcgtcagctgtttcacttgccggtgagcgagctctaatttttcaagcgtcagctgtgtttttattttttcatcaacttgcgcgaaaaatgttgccgcatacgtgataatcacgatcatgatgggagcggcgataacgatgaaacgtagcagatgatgcggatgctcctggtgcagggctgttatggacattaaaatgaaaagatagagtatgagcagcgtttttcccttatccgccattccgataatctgcccgattaaaaaggcatagagaccgacgactaccgcgatataaccgccggccatcaagttagccgatgtatatatgataaatccctgtatgatgaaataaagaaacgtttttttcttgacccagcgatgggaatgccaatgcagcacggtaaaaatgacgatcaatatcgtgaataacagcagcaaaaaaaccgtccagctttcataaatgtactgcaaagagactgatgcggcatataccataaaaataaacgccagaccgggcacccgaagcgcaagcatatgcaatgagcgtctgtcacgggagacatagtcttcttgatgttttgtaccaaacaatctctgtccacttccttttagccgaccggcctcacgaggttttattctatttgtcatcataccataagtgccttcttctcaccttccccttctgttgctgcatgacgggtgaaagaaaaaacagcctgcgggattgtgcgcaagctgcttttgttcatatcttttttatgacctttcccgggtttcagcggtctcgtctcccgcgcggcaaaaccgcccgcatcagaaaaatgttcatgacaccaacagccgttccatatgaacaagaggaagcgattgtgcttcctcctttttttgatgcaccgtcaggctttttctccgctttttctgataaacaaaatttgtaagactagacctcttttctcaggggaaattaactacgtatttctacaaagggaggtttcagacgattatggataagcgtgaattagcggctcacgagtcgctggacttacatgaactgattaacttcaagacgctttgtgtcgcgaaatccaagctcatgcaagggcttgtgtttgatcaggatctgaaaacgttaatggaaaaagacgttcagcaagcctctcaagacctggctgatctgcaggcggtttatgaacgggcatcttttcaggctcctgttcctcaaaaccggccgacttcgatcatcaattgaaaggaaggtaagcatcattgaatcatgaccatttagatccgatcaattcattacatgtccctgaacttgcggatatgacattcgcaatggattttctcatacgcgccaaagaaggcgtcagaaataccgccgttgctttaacagaaaccgcttcacctgatgtaagagctttgctgcgcaaacagctcatgcagggaattgcgatgcatcaggagataacagacttgatggtcagcaaaaagtggtttcacccgcatgatctgagcgaacagtataaattggatcagctctctgcgaaaaataccctcatggtcggaaatatgaatctgtttcccgttgaaacgaacagaaaagggatgtttgaccgcacacctgatgaacactaacactggaggtattacagcatgaaggccgtaacgtatcaaggagtgaaaaacgtcgttgtcaaagacgtgcctgatccgaagattgaaaaacacgatgacatgattataaaagtcacaagtacggcaatttgcggatcagatttacatttaatccacggactcatcccgaatttgcaggaagactacatcatcggccatgaaccgatgggcatcgtggaagaaaccggtcccggcgtgacgaaagtcaaaaaaggcgaccgcgtcattattccttttaatatcgcctgcggagaatgcgtttattgtaaaaatcacctggaaagccaatgtgatcaatcaaatgagaacggcgatataggcgcttatttcggctattcaggaaatgccggcggctatccgggaggccaggcggagtatttgcgcgttccatttgcgaactttactcattttaaagttcccgaaacatgcgaagaaccggatgagaaactgagtgttatttccgatgcgatgacaaccggcttttggagcgttgacaatgccggcgtaaaagaaggcgatacagttatcgttctcggctgcgggcccgtgggccttttcgctcaaaaattctgctggttaaagggagcgaaacgcgtaatagccgtagactatgtcaactaccgtctccagcatgcgaaacggacgaataaagtggaaatcgtgaacttcgaagaccacgaaaatacgggcagctacctgaaggaaatcaccaaaggcggcgctgatgtggtcattgacgccgtcggcatggacggaaaaatgacggatcttgagttcctcgccagcggattaaaacttcagggcggggcgatgagcgcattggtcatcgcgtcccaagcggtacgaaaaggcggaacgatccagattacgggtgtgtacggcggcagatacaacgggtttccccttggcgatatcatgcagcgaaacgtcaatatccgatcaggacaagctccggtcatccactatatgccgtatatgtttgaactggtgtcaaccggcaaaattgatccgggcgatgttgtaagccatgtcattccgcttagtgaagcgaagcacggctatgagatgtttgacacgaaaacagatgattgtattaaagttgtactcaaaccttaaagaacggaggctacagaaatgaccagcgccttacatgaattactcgaaattcaggagatggcttcttttaagtcactttgtctgacgaaatctaaaaccatgaaagcgctcgtatccgatccgcagctgaaagaaatcatgcagcaggatgtggatacatcaacaaggcaattgcaggaatttgcctcaattttatctgatgcacagcatgaatgaggagatgaatgacgaatgaatccgattattgaatacttgacgggaatgaatgcgctgacagaccaaattgtcgcaatggatttattgaattcggcaaaaagcggtgtcagaaactatgcgatggcggcgacggaagccggaacgcctgaagtgaaagcgatcctcacccggcacctagaagaagcccttgacatgcacgagcaaatctcacgctatatgatggaaaaaggctggtatcacccgtggaacacaaatgaacaagtccggctcaatttgcaaaatattgatactgcgctccgcctgcccgtcctataaatcgttttgctgctgagacagcacccctgactcaagcttcagtatttcaaactgtgagctgccttttacagcgcccaggcagctctcagtttttttatgccttcttgtatatcggtttcagaaacccccgcgaatccgagggaaactgttttttcagggagctgtttttgataggtaagagacacgggatagattttgacgccttgttcctccgccttttcaatcagctctttttcgctgaaaggcagatgaacgtcaagtaaaatccgcagcccggaattttctccgcgaatcctgacgtattgtcccagctcgcgccgcacggcctctaataataccgctctttttttccggtacagctttctcattctgttaatatgtttctgccactctccgcttttgataaattgagccagcgtcagctgactgtgacaggagacggtttgtttatataaagaagcgatttcccttcctttttcgataagcggcaaaggaagaatcatatagctgatgcgcagcgaaggaagcagagattgggaaaacgttcccatataaatgacacggtgatgctgatcaagcccttgcaatgatgggatcggctggccggtgtatcggaattcaccgtcataatcatcttctataatgaacgattgatgttcctccgcccatttcagcagctgaatccttctgtttaccggcataatcgttcctaacgtaaactgatgagatggcgtgacatatacaagacgcggccgctcttcattcagcttccggatacagactccttcatcatcgacgggtatcggaatgatcttcatgtgattggctttaaaaatctccctcgctctcggataacccggatcttcatatccgatggatagatttgattcaaatattttgcacagcatttgcaaaagagcagggttcccggcgccgactatcacttgttcaggacggcaattcacgccgcgcgactgatataagtactctgaaatgagcgttctcagttcaagctcgcccaaatcatccccgggccgatacagctcatgcccgtattgatctaagcttgcaaccatgcttttgcgccatgccgaaaaaggaaaatgagcggcatccacagtgccgtagtgaaaatcaatccattggcggtcttccttcgcttttgtttgaacaggcgaagcgcccggctttttcacatagacggcgtccgagtcataatcggcaaaccatccgcttctcggcttactgacaatatagccttcggcggcaagctgttcataggcacgctccacagtcgtctgactgacggaaagctgacttgacaaaagcctttttgaaggaagcttcagtcctttaggaagacggccatgatgcatattttccttaaaatgccgataaagctgctgataaagcggaatatccagatctctatttaaaaatggcgtgatatccatttttactccctccaaactggcattcttctttttataaaaactggccatttgtataaggccaatttcagtttatagtcattataaactttgaaaatgtgtttagaaatatatattggagtgattggaatgaataaagccgcaaacggctggattaacggatttatcggcgtgctcattttcagcggctcgcttcccgcgacccgcttggctgtagcggactttgatccggtatttctcaccgtatgccgcgccgcgatagccggtatattggcaggcgctctgctcctcatttctcaggagaaacgccctgccaaaagcgacatcatttcactaataacagtagcgctcggcgtcgtgatcggtttcccgctgcttacagcattagcgcttcagcatgtcacatccgctcatgccattgtctacatcgggcttcttccgcttgcgacggcgatcttcggcgtcctgcgcggaggcgaacggcccaggccggtcttttggattttctcggctgccggcagcatcctcgtagccggatatgctctgctgcaaggaggagaatcctctccgctcggtgatacgtacatgatcgcttcgattatcgtgtgcggtctcggttatgccgaaggcgcccgcctctcccggcggcttggcaactggcaggtgatctcttgggcactcgttttatcgcttccccttatgttcatcctgtctttctgcttcatgccggactcatggtcaaacatcggcgcgcccgcactgctcagtcttgcatatgtctcaatattcagcatgctgatcggcttcgtattctggtatcgcggactcgcccagggaggcatcgccgcggtcggacagctgcagcttctgcagcctttcttcggactgttactggccgccatgattctccatgaaaaagcaggatgggaacttgcggcggtgaatgccggcgttatcgcttgcgtggcagccgcccggcagttcgcaagtcaatcagaaaaggccgaacaatgaacttgttcggccttttcattatattccgcccataggcagcaaaagtctgcatttctttcacatgatccgggtatttttcaggcaggctgaactcccttaaacgcactcatcaccagatcatgcacataagaatcattcacctcatcacctgtaatcaacaggcgatagaaaatcggcccgtaaatgagatcgatgctaacgtcaatatcaagattctctcttaattcacctttttgaattcccttttccagaaggcctttcgcttggaggcggcggggctggaaaaatcgcgtacgatattcttccgccaattttgcatccagctgccccgcaccgattaattccttaataacggtcccttcccggctcgtcaaaaaccttgctaaattcgtggcgtgggtcaatatatcttgcactgttgatcctgtatcgggcacagggagtctgtccgtagcggtcgaaagaaagctgtccatgataaccgcagccttgtttgaccaccatttataaatcgttgccttactcactttggcacgctcagcaattttatcgactgtcaccgcgtcaaagccattttccaacaataggtcatacgctgcagaaagaattgccttatgtgttccttcatcgcgcggccgtcctcgtttactctgcacatgaatcattccttcccgaattataaacgatacgttcagtatacttaacctgtataaaaaaagaaaacagaaacccatttacaaaactgaacgtttagtatattatttgcttataataaaactaaacgtttagtttataaaataacttgagggaagtcttgttgaaatgcagactccaaaagcctctgcgtaaaggagttgaatcagcaaatcatttatcaagcatcataaaaaccatttaaaaaggagttcattcatatggctaaagaaaccaaacaaacagcagatcagggaatttcacctggtttaacccttcttctcgcaacggcatgcggtatcattgtcgctaatctttattatgcacagcccttggcaggattcattagtgcggcaatcgggctttctccaagcagcgccggattgattgtcacgctgactcaaatcggatacgttgccggcttactgtttctcgtccctttgggagacattatcgaaaacaaaaaacttgtcgttgtatcgctccttctaagcgcatccgctttgacactgacagcatttgcgaagcatggaacactgtttttagccgctgcgtttttcatcggactgggatcaattgcagcccaagtgctagttccgttcgcatcataccttgcaccagacgccgcacgcggccgggttgtcggcaatgtgatgagcggcctgctgctcggtattatgctttcccgtccgatatccagtctggtcgctgatatatgggggtggaatgccatatttactttatccgccgcgttaagtgttgtcctggcaatcgtcttatcaaaagtgcttcctgccagaaaaccaacagcaaacacaagctacaccgtcttactcggttcaatgtggaagctgctgcgcacgactccggtcttacgccgccgtgccatttatcatgcgtttgtatttggagctttcagcttgttctggacgactgtacctttattattgtccggtcctgcttttcatttttctcaaaaggcaatcgcgctgtatgcattagcgggcattgcgggtgcagcggctgcaccgataggcggccgtctggctgatcgcggcttgacccggcttgccaccggaatcgctctcggtgttgtcatcgtttctttattattcccgctcatgattcagagcagctcccccgtcggaatagcagttctggtggccgcagctatcctgttggatatgggggtatctgccaatctcgtactcagtcagcgtgccattttttcgttggcacctgaatttcgcagccgattaaacggattatttatggcaatcttctttctgggcggtgctataggatcatcaatcggaggatgggcatacgcctcaggcgggtggagtatcacattatggattggaatcgcttttccggtcatagcattgctttatttcaccacggagaaataagccttttcccaaaaataagccgtcaggaccaagctgacagctttttttggtgtattcttctttacatccatccgaacaaaaaatccggattcatgaaaagatgatattgattctttacgccccgctcacatagccggacttccaattctttcagcagcggtaaaaccatgtcataatatttaagaaataattgcgccataggcaggtgaacacatgaagaagtatttatataaacaccttttgttagctctcgtttcgtccgtttgctttttattagtcttttacgtaagtttaaaaatgacacaagaggacacaccgccgttgtcttcttacccgttttacctttttatttatctgtacatagcagccggatatttgacggtcggccttgttttagcttgtatgactgatatcttgaagaaccgctggacattcaataaaccgtctaccattctattgaaacttatcgtttacttactcataccgtatgctatttttcattctttcttcattttaatggcgccgttgatttatgtgctgtttgagtcgttattcatcctgagaaaagcttcataacctgaaaaaacataccgcatgctgccggtatgtttttaatatgcttgtcagttgttcgcagtgatccgtttgatgttttcttccatcaagccggaaataagctgttcgtttgtatgagggatctgtttgagctgttgtacgaccagcccttgtcttgcggctgaatgattttgacttagctttgctttcccctctattttgctgattttgattttaaagccttttacccctttgttcatgcctgccagcaatttcgcatcgacatcctctaatttgtacgggctgtcggggctttcgtatttcaatacgagatcactcatcgactgcacggtttcttcctcatccaaaagctccgcttctccgtaaacatgaaccgccacataattccatgtgggaacagcctgattcgtctcataccatttaggcgagatataacaatgaggcccttgaaaaacggctaacacgttttggccatcaatctctttccattgggggttcggcaatgcaaaatgaccgtataagcattcgttattcttactcatcatcaatggcaggtgggtcgcatacggcatgccttccgctgttgaaaacaatgctgcgaaaccatactctttgattacatcgcacgcttcagcttcactcagctgaaatggagccggaatatacatacaaaactctcctctctgaacatggattgataaagcgctttccgctataataagatatcaactgacatttaaaaagatacagttttgaataaatacacatgtcagaggagaacatctgatgaaaaatatgattttcgctttcggaagcgacaccccgaaatacaaacaaatttacgagcaatttaaaacattgattgagcagggaaatattcaggcagatgagcggctgccttcgattcgggagctggcagattccctgcgggtaagccgtaatacaacgctgatggcttatgatcttcttttagcggagggatacattcgcggagaaacacgcaaaggttattttgtaaatgaagtagaaccttctatatttcaaaaagaaaacgatgttgtttacgctgaaaaaaccgaatcaactcagccggttctgattgattttcgcgccggagccgtcgatcaaaagcattttcctctcaaaacatggagaaaattatacaatcaagttttgacatcagagaaaagcttcctgtacggtgaaccgttcggcgagagagacctgcgtgaacaaattgccgcttatctcttggaatcccgcggagtgaaaacagatgcggattccattatcatcggcagcagcacccagcagatgctgatatatctcagccggattctgaaagaggatttttcgggaatgatcgttgaagatccgggatttgacggtgccagagcggcatttcaatttcacgggctttctctggaaacgatgcctgtctatgaaaacggagctgatttttctcaattacatgcaatgaaagaaaaattaatctatgtgaccccatcccatcacagcccttacggcgtaagcatgtccattcagcagcgccaaactctgatcaattgggtgaatcatagagagggttatattcttgaggatgattatgacagtgaattccgttacacacagcagccgtttcccgctcttgcttccattcaatcagaccgggtgatttatttagggaatttctcaaaatcctttcttccgggcatccgcataagctatatggttttgccgcagcgccttttgcaccggtataaaaaacggtttattcatttcgaaagcaccgcttcttcgcttaaccagctgaccatggctgaattgatgaaggccggtgaatggacccgccatattaagcgcatgcgcattgtttacaggcgaaaaatgcagcacttgatttcacatgtaaagcagcagttcggcgatcatgtgacgatcatcggcgagcagtcgggattgtatatattggtgagagttcacctgaattatacagaagaaacattaatcgaacgcgcttttcagtacggagtgaaggtatatcctaccgccgtttatttcgttgccgaaaaacccgaaccgccgatcataaagctaggtttcgcccatctcgatacggatcagatcacacagggcgtacagcttttgagaaatgcttggctgtcatgaaagaaaaaaggcgccgaacggcgccttttgttatctattatttcttgtgaatttcggcagtccaaatatgatggcggcgatgccgcagattccgattaaaacgggatagaaagagtatggcaggatgctgactggtgaaatattcccgaatttcccggctgataacagctgcgcgccgtaaggaatcaatccttgtatcatacacgaaaagatatccagaatacttgccgattttctgttgtcgatgttgaatttatcagcgatattctttgcaatcggcccggctgcgataatcgagatcgtattattggccgcagccagattcgtcacgctgaccagtccggcaatgccggcttcggctccttttttcgaacggattcgtttcgtgatgaactccagtaaaaagtcgatcccgccgttttgtttcatcacgccgaccatcccgccgatcagcatggacaggatgatcagatcgctcattccggcaattccatccgtaatcgccttaaaataagagtcaagcgtcaggctgccgcccgctaatccgatgattcccgtcaaaaccaatccgccgaatatgacagccatcacattaatacctattaacgcaaaaactagcacggcgacataaggaagcaccttaatccagttgtaagattcagcacccgtatggccggcgtggcctgccggaataaaaaataagataataacagtcacaatggcagcaggcaaaacaatcagaaagtttgttttgaatttatccatcatttgtgttttttgcgtccggactgacgcgatggtcgtatcggaaataaaagaaagattatctccgaacatagctccgccgaccacagccgccatcgtaatcgcgccggagatgccaagctctccgctcaagcccgcgctgatcggcgcaaccgccgcaatcgtgcccattgatgttcccatcgatatagaaataaaacaagcaatgataaacagccccggcagcaaaaactgctgcggaataacgctcaaagcaagattgacagttgaatgcaccgcccccatcgcttcagccgctgaagcaaaggcacctgccaatataaaaatcataaccataatgataatatcaggatgtcccgcaccggaagcgaaccattctattttttgattgagcgatttcttccggttaaataacagcgcaaaagctgacgcaatgatcgcggcaatcaagatcggcaatttataaaaatctccggtcaccagaccagagccgacaaaaagccctacgaataagactaaaggcaataacgcccaagggttctttttattgttcatctgggtaaaccacctcttttcagcattaaagtcgctaatcacagtctaagcaacatttcacactttaaaagtctgcagtaaaaaagtcaagctgaaaaaaggataagtaatgattgataagatagaaaaagctgttttgtttcctctctttagaaaataaaaaaaaccaaggctcgtttcccttggtacatttcatgcggcccggcgtccgggacaccttctcttcattcagaaatacattcagctttcaatctgtttttaagtttcgcttcattttcaaggatatcttcgtaatcctcaatcttcctgtttaatcgttttatggtttcatcaatttccctctgtttctccgtcagccttttcctttcatttatcaggatgttttttcggggttcaatcgtatgatcggctccttcaataaataaagcggtatattcaatcagcgcctctatcgacagcccggcacttctcatgcattttataaattgaatccaattcacatcatcttcatcataatcgcgaatgccgctttcatcgcgttttaccggaggaatcagtcctatactttcataatacctaagcgtcgcggctgataactcaacctgctttgcagcctgcgcaatcttcatattcttatcacctgtccttcatacctttcataagcgtgccattatagaatatcatttcataaaaaaataaaccaaactccttgacttaaagtccgctttaacatttaaagtaaaatcgaacagaggattcatcactttatcttggaaaggaagataaccatgtgtaataatcatccgactcgtgtattaagcgctccgcatgcaaaagctaaatttgagcagacgacgattgagagaagagcattacggccccacgatatcctgattgatattaagtacagcgggatttgtcactcagacatccacagcgcattcgatgaatggggcggcggaatctttccgatggttcccgggcacgaaattgccggagttgtggaagccgtgggtgaagaagtcaccacatttgccgtcggcgaccgtgtgggtgtcggctgttttgtagactcctgcggggaatgtgaatactgccttaacggagacgaacaatattgcacaaaaggcgttgttcaaacttataataacctggactacgacggaaaccctacgtacggcggctacagccagaaaatagttgtcactgacagattcgttgtccggattcccgatcagctggatttggatgctgccagcccgctattgtgcgcgggcattaccacgtattctccgctgaaacactggaatgccggccccggcaaaaaagtggcgattgtcggaatgggcgggctcggacatttagccgttcaattcgcgcacgctttaggcgcagaggtcaccgtcctcagccgctcaatgaacaaaaaagacgaagcgcttgaatttggagccgatcactactttgcaacaagcgatccggatacatttactgagctggccggacgatttgatcttattttaaatacagtatccgcaaaccttgacgtagatgcctacttatctctgcttcgcattgacggtacattggtaaatgtgggagcgccagctaagccggactcatacagtgtgttctccttaatcacgggccgccgcagcattgcgggttcactcgtcggcggtattccgcagactcaggagatgcttgatttcgccgccgagcacggcattgctcctaaaattgaagtgatacccgccaatcaagtcgacgaagcgtacgaacgggttctccaaagcgatgtccgctaccgtttcgtcattgatatttcaactttataattcacataaaaaacataccaatatctattggtatgtttttttctgttcagattattttttatttcagcagccatccgggcactgcttttatataaaccaactcgcctatcaattcaacgatcgtctgtgtgacgataacagcggcggctaatgaggcccaagcatccggcaaggccagtgctaacggaaggactgcgagagaatttcttgtgcccgtgctgaagatcaatgctcttccttcgcctgtatccagacggaacgcatatgcgataaaccgggaaacaaacggcataatgagcaggaataacaaatagattgggatcacacgtataatgatgtcagcatcactgatgaccttgccgatttgtgtggcgacgaccgccagtaagaccagagccataaaaggaacaggcagccacgccgtccactctaacatcttttctcccgccggcttcttatcagcccacaattgtgtcatcactgccgccagcagcggtcccgctattaaacataagaatgcttccagaaacggtcccgcatgaacagcccctatcacttctttcccgataaacagccacaggtataacggaagcaatatcatctgaacggcgaacaaaaccggcgtggaagccagtattaatctctcatttcctttgccgagctgagtaaagacgatgacgtaatcaatacaaggtgtaagcaataccaaacaaacccctaataatataggaggatattgaggaaaaatggcggttaacacccatacaacgacaggtacagctaagaaattaccgatcagtaaagccgccataaacttgaggtttgacatggcttccctcagcttcaagaatgggatttgggcaaacatggcatacatgagaacagcgataagcggtgatatcgtccatccccagcgaagtcctgaatctttcccggcgatccccgctattcctccgatcacaagagtcacaccatatatccaaatttgctgtttttctaatgtctctctggttattttcattggctgacacctcttccccgcccattataccttcttttctgccggaattaaaaaacaccaagtgtcacagacccttggtgtttttggaacgcgggttattgttgtcaaaaccgcttatgaaagtttacttgtgttctctgtcctgccaacgaataaggtggccgcaacactggctgaactgaccaaagttcccaggacggcagcaagaattgtcaaaaagccattgggaatcagaaatccaatcggaatgagccccccaaacgtgaggacgataaaactttgataaactcccggatatgattctcacaaccaagttgccaaaaaaggacatgacgaatggcggaatgaacaaacataagatgattccgagtgagatcaatacaatcataggctcgtcaaaagaaatgacacgatcgccgggagactcttcagcagccgcgaatacagcaaatatagacattatcagcgtaagaaaaacaagaaaaaaccttttcagcaacgttatgactcctttttttataaaacgggtatctttttttcaatcataataaccattttatgttatcaaatgaaataatatgaagtccattgatgaatgaatcataataaagcatggcattttcttccgcgaagccgtatcagcaaatggtttgaagagaaacagaaaccttgacattacatccgccttatcaggataaaaaaggaattcactgcaaattccctgcggattgtctattttcactgactgccaatcaattaaaatggtcagacaaaaaaccacatttgctgttgaaaagttgtggaataaagcatcgcatcaactgcactatgacaagctgaaacgttaatattttgtgtttcagccatttcatcatgctgtcccaataccattttttctatagtctttgtagcagcaaagtcctctggaatcctatactaatcttccgcagccgctgcatcggcctttgtcacatgaactgtaccaaacggatggttgggaggagcataaattgaatatagttttaacggcgtattacccgtattaataacattgtgccaagtgccggcagggacaacaatggcataatcatcatagacatttcttcggaaacttaaattatttttactcttgcccattttaactatccctcggccttgctcaatccgtaagaattgatctacgtgaggatggatctccaaaccgatatcttctccaataccaagactcatcaaagtaatttgaaaatgctctcctgtccatagggccgtacggaacgtattgttttgttttgcggctttattgatattcacaacaaatggttttggtccataatctttcaagagaaggtttctatcttcgtatgaaggacgcaaatcaccatagttatttggaacagtccaataaacagatcttccatcgctatacatcggtacattcacacaataataacattgatgcgaaaaaggtatataatacatttttcatccccgcaattttaaatttttgtgatattatcctatgctttttgtaatgagagtgtgccacactaaggaattcccttgttcagcctaaaagacttaagttagcagaaacgttttggccacaaaatccgtttgcataaaaaataccaaaggtctgcaactcttgataacactgatgcagccgagaaacttgaacctgcccggggtatgcactcaccagtcccgacaaccaagagatagtgtgttttctggcttgttatttgagctatttcgacttttgcttgaaagaattaaattagagagtctgaacgaggagtacagcacgcgccccatgtgaatccatttagttcaaactgaatatgcgcggactaaaatagttgcactgatggatactttaggcacatgcccttatcaaaaaacaatctgggtgcatatcctgctcctaaaagtcattcataaagggagtttagatatgtattattattattatccgtattatgtatatgattacagacagcagcctgatttaagtcaggcaaatcataaaatgcgaagccatttatctgcgattcaacaaattccaatacactcatcctcctttcaacaatcaatggctgcggtagtgaaacacttgcaggctgtcagcagagcactcgctctgggatgcggtatgagttcagaattcagatttcttccagacacttggggattacgagaacttcatattgtacacgcgaaataccttactccgttgagctatcacgtttattccgctttaggcgcggcagagcttctcgcctccggacaaggccgggctcctcattttcctcttatggttggctgcatgaattcaatacttcgtctatggtcaaacttccccgcagcgatagcagacctgcgaagagcagccggtcaccaatacgtgtcatctgtagacgaggcggaaaatctcctaagaccaatggttccagccacacaacaggcattatccatcagtcaatctgcagtgagtccggctatttggcaggcttccttacgtgccgcgcagttagctcgggaagtacgtcagaatgttgcacaatcaatgagtcagggatcttcttattaattaagccaaaagattttttcggctttacacagtcacataaccggacttaatcaacacaaaaaagagcagtaaacacataagttactgctctcctcagtctatccaccgttcatttgttttacaatgtattcagcatcatttcctacaccttgaagcagcgctgaacctcgcctatgctgccaaggcaaaccaataaaatacaatccttccacagatgaaacaccccggtgatgtataattcggccttccttatccaaaacaccttctattttcatccaacaaagcggattcttaaaaccagttgcccaaatgatattgtttacttctaatgaagatgagtctttaaaaaagatttcattttgctttccggccatgactctttgttttaagatgatcttcttctgtcttattgcatgttttaattcatacccaaagatggggtcgcctttcttttgaatgaacttgcctaatattgatgtatgacttgcacgtaaaactcctaatttatcaaaccaccaaaagatgcttctttttccaatccataaagggaaataagccgttttattactgcaagccaaatatgtaactctttctttggataattcaacagctatctgagccccgctattcccgccgccgacgaccagtacattcccaggcgccagttgttttgaatgtttatattgtgaagaatgtaattgatgaatatgatcggctacatcccttgatattgatggaatgttaggggtatgaaaaggacctgcggccatcacaagattcttcgtttgatattcttcccggtttgtttttattaagaaatagttctttaatttttggacacttattacttctgtccgtaattggattgggatttcaaatctttcaacatattttttcagataagcagcaatttcattttttgaagggagtccatgcttgtctccttcaagctgcattccaggcaaagagctgtacattcgagaagtaaataaaaccaatgagtcataccggtttttccagctttctcccacttcatgacttttatccaaaatgataaacttttgtttcgacttctttagataatatcctactgagattcctgcctgaccagctccgattactatcgtgtcgtacatatgaatccccccgcggttttagcttaattgtcagcagacaaagtgaacccctattaatgatgatgatggtcacgcggattctcagtttgggcctgacaaagaatcgtattgtcgtgattatgcgctgctgtttccatttgaatggttacatgtgtaatgcctttatcaccaagttcatgttcaatcatgcgtaaaatactttcgctttctgaaatggtcagttgatcgttaacaacagcgtggcaggaaagagcattcaatccgcttgtgatagaccatatgtgcaaatcatgaatgctttgaattccttctgtctcttcaattgtatgaatgatgtcagtgacatcgatattttccggagttccttccattaatacgtgaatggagtctttcgtcacatggtaaccgcttctcagaacaagaatagccacaatgacactggccgctggatctgcccagctccacccgaagaagatgataaggatcgcagccagtatggcacctacagatccgagcatgtcacttatcacatgtaagtaagcccctcttatgttcaggttattctttgtatctccgccgttcagcataatccaagcgaccaatatatttacagctaacccgatgatactaatcgtcagcattccggttgttgctacctccggcggatgagagaaacgtttgattgcttcataaatgatataaagggaaatcaatattaatgcaacaccgtttatcacagctgcaagaatctcaaatcgtttgtagccgaatgtcttatgatgacttgcctttttttcggccaatttaaaagcaatcagagcaaccattaatgagattgaatcactcagcatatggcctgcatctgataaaagcgctaaactattggttaaaaatccgcctatcgcttctattatcatataacctgtaatcacgataaaagagatcaataaaaccttcttattggatccgccagcgtgattgtgattatgacccataaaaatctcctccttatctcatacactgcatttattatttcttttctgttatgaagcattctaacatggacacaaaaataaccatatatgattatatgctcatatatgaatatataggttctttactgaaatgtcaaaatatttttgatgaaaatgtccaatactttatattgctcttaatcaatgattggtatgaagccgcggattacagtaattactttaggcgcagacactttagaaaaatcgctgcacctctatcgggatggcttgggtctgcctacagaaggaatagcctgtacagaatttgaacatggcgcagctgctttttttgacttgcaaacgggacttgccctttgggaccgcaaaaacatcgcacatgaatcaaacgttacgttcactgctccaagtactgcggaatttacatgaggacataacgtcagcagtaaagctgaagtcgataaagtcataacaggcaggagcaacgataactgatcccgctcatgatactttttgaggcggatatgccggtcacttccaagaccccgatagacacttatgggaaatcgtttggaatccgcactggggtataagtgaataaccacatttcagaaatgaaaacaacaataaaaacacacctgaatgttctggtgtgttccaacagaatgcaaacgcagcattttattttgtttcccaaaacgatcaaactatttatacgatggcgggatgctttgcggaaaacggaatacattttcgggatcgtatttcgcctttattctttgaagccttgcaaagtttgagccataatatgctttcccgaagttctcgatattttgatccggaacattcacatatgaacctgttacatatggtttcatcagctgacgcactctttcaactgatgcaagattcgaagcttcttgtgatttatttttccaactggccgtccattccgtataaaacaatggccggcgccaatagaaggctgtttcactgcttggaactctgcttatcgcgccgccccaattgataaaaaagaaattggtttctgtcccggtcgccttttctaaaaattgtctcattactgcaataggttcttccggccaaagattgagcgcccacgccgaggagaatttaacactctgatcagatctgccgggaatcggttcgtcaggatctaagaaatctatacaatccgggtagtatagtgttttgattactgtttgtgccggcgttccggcatttaataaaggttttaataattgaaccagctctggttttgaaccgaggaacaatccttccgcatggcacaagccatttactttgctgtaaatctcaaggtagcatcctaatcgttcgtctgtaaacggcgcccatttttgccacgctttaaataccgtttctaactgttcccacggccaaataatattaaagacggttgcgattttaggggcacggtgaactttgaacgtatattgggtgttatatccgaaattgcctcccccgccgcctctggaagcccacagtaaatcttcattgcgggattgatttgcttgaataatcctgccttttgcatctaccattttcaatgcgagaaggttatcgcttatcaggccgatcgatcgggaaagcactccaaatccgcctcccattgtgattcctccgattccgacggttggactgtctccgaacggggccataaaaccttcccgagctaaaccttttacaagcgggccgacgtgaatgccggtttgaacggttgctaccgcgtttttttcatctaagaaaactttattcatgtcactcacatcaataacaatcccatcacttaccgtggaaagatttttatccagagcatggcggccgcttctgacacgcataggcacattcttctcacgagcccatttaatagcattacttacatcgtatgaattttgtgcaaaaacaaagacaagcggacagacatcaacataagggttccaattcttaaccgcctctgtatagccggggtcccctttgaagatgacgcgtcccgttaactgtgctgatcccatctatttcactcccaataagcatttgattccgataccagtatatgtaggaattggacaaattcttagacagatgttctgcaaacttataaatagacacatatacgcgaagatgatttgaaaacaaaaaaagacaagagcggcaagctgccgaaactcttgtctctcctgccttttttatcatgataggcacttacatttattggcgtgatatcccgaccaaactatggaagtccatagaacattatgtttgccctgccatgcgcggttctgctgagacaacggctgagcaatctttctgtttgatcccccaacaagaatcttattctttatcgtttttgcacccctgtacggataacatcaatacacattgaatcttatctttcacatgatgaaaagctcttattttttcttcttgtgcttacgtttgcaatcctgttttttctctttcttatgacgttttttacatttcgcttttgctgctaattttgccgcttctacctttgcttctgctgctctggctcttgcttcttccgctcttgctattgcctcttccgctctggctctcgcttctgcttctcttgctgcttccgctcttgcttcatcgtccgccatatcaaaatcatggccaaggtcacaggcttcgttgtatggctttttcttctgaacgtactgttgatcttcaccttcgttataatacattacgccactccttctctcatttttcaatctttacatactatgtaaataaataactgcagcttggactggtattatgatgaaccggcacattttagggcaattttgatttatcgatacaaacagattctggatgcttgaatgattttgacgattatattaagcagcgtaaaaagggagactgcgaaaaaggatgctgcgcgctgcagcatccttctttaccaactttttgtgtttttgacttttagtttgcttgctgtgtttgttttactggttctttgctaaaaagtcccacaatgttccacaagataattgcagcagctatgatcaaacgagccgtactgacttcttggttagtaaacaatttatagccatatattgatcccaatgctgctatgcaaaaaatattgaaccatttactccaacgcaattagaaaactccttataaaatgattacatttccaaacaatgtattataatattaacaaaatttttcaatatttaaccttaaatcattcttaattggttttcctgatcattttctctaatcgtcattcaatctttcggagttttgatcgttttttgttacaggctagacccagacatcattttcagctgtttgatcagttatttcctgcccggtattcacaacacctttaggttctgcaagcaaaatgttacactctgattctgcataaggtttatgttcaacatttttcggaatgacaaacatttcaccttcatttaattttacttctccatcacgaaattcaatgattaaattacccttaatgacaatgaagacttcatctgtttcgtcatgcttatgccaaacaaaatccccttgtaccttaacaagtttaaattgataatcattcagttcagcgattacttttggagaccattgatcttggaacgcagctaatttctcttggaaattaatcggtttatattccattctttccccttcccgtgtaaaactcaatcatttaactagtcccaaattaaaggcctgtccacttcagcagttctgagatagtctaaaagctgaccggtatgtacggactcatggtaagcgattcttaataacatgtctcctagttcgcgaatatatccaacatcagacctgtcaatctttatatttgttaaatctgtttcgtttaacgatttgatgaatgtcaaaaactcggcccgatacggttttgcaaattctaattcttcggttactgtggtaaacgtttttgattcatacgggtttttagattcctctgaagactcattcatttgttttagtaaaatgtgatgataaagaaattccgcttctaatacatgtcttatcatttccttacacgacattgcttcagaatccgggcgccagtccagtttttcctcaggtatagctgtccataacttgatgcttcgccgtcttacttcttcaaaatttaaaataataaggtcaatcgtattcaagtgttttcccccttttatttttaaataattctccttcttcccggaaaaaacctctttaaataaaaaacgtattctttcccgactcgctggattggtaatttaagataagaagatattcattcatccatacaatagactctggctgaacatatactgaatgatagttttcatcagaaaggagaaatcagctttggcaaaatatcggatcatgacctttgacgggggcggtaccttaggtgctttaagtttacaactattgaacagactggctgaagaaaatccagcattaataagccgaacccatgtatttgcgggaaattcaatcggttcatttactgcccttgcattagcaagcggaagatctcccaaggaaacacttcagtattttgaggatgaaatcctgcccgcattcagtacttcccggccgggcggacctgttttcaatcaacaattaccatattccggttttattaaagcggtacgaaactttttcccgccaggccttcgtcttaaagatgtaagaaaacgaattgttgtcccttcattcaaattatactcccccgcactggatcgttggacgcccgtattatttcacaactttcccggctctccctatttaaatgagaaagtgagtgatgtcatactgcggagcagcggtgcccccgcgacgcagcgagcctatcaaaactacgtggacggatatgtagtggcaacgaaccccagtacggccagtatcgcgtttgcggttggtaaagccaacgtgccattggatcaaattgcggcgctatccatcggtacaggtgaagccccgactcggttaagaagagatacgagagggtggggaatggtaagtgcggataacatacgtcccgaaaacctgaagaacctccctccaaattggggagttcttttggacaggtcgcctaatgaacctttactgccatttcttcagatgatcgccggcggaaatggctactatgaatctatggtcagcgcgaacctgctgggagatcgctttttccggttagatccgcggattcctaacttctccaaaacggacccttccgtagttcccgctgtcattgaaattgcgaacaaaaccaacttacagcctgcgaatacatttatagagaaaaactggaacgacagctactaaggaaattcacatcttaaaacaatgaacaaaaaataccaagggactcaaaacccttggtatttttaatgcggctgagaggatttggacattcacgggttatttatacgctggtcattcgataaagtgaaagcttattaccgcccggcatttcaaacactgaagttaagcattacaaccaacaatcgggccatttaattgaataggactactcagaagccgcttcccattacgtaagaaaagcgactttttagatttgattttcaagttcctttgacaaattttgaaaagaccattgactattcagttggactgtattaagtttaactatatagtcagactgaatagaggatgaggatatgaaacataaattattaccgctgtctgaaaccatgcattatattttattagctttgcgggagccgcttcatggctatgccgccatgcagaagatcgaaaagatgagtaacggaactgttattttagcagccggcacattatacggcgcgattgaaaacttgaataagcatggctggattgaacctgttggagagtcgggccggagaaaagtttatatgataactgcggaaggaagcgccattttgaaaatggaacaaaacaggttactgcatattttatccctgtacgaaggaagtgaatcgaatgaagacatttaagatgttttttgatattgaaaaagaggagcaatggctgaacgagcaattgcaaaaaggctatcgctgtacaaatatcagcggattaggaatatacactttcgaaaaaaccgacaagagatatgtgatgagactggattatcatgattatttatcaaagaaaaagttcaaagactacagagagatctatgaagacttcggctggagttatataaacagcccatggcttagcggaactcgatattggcaaaaagaagatgatggtcaaaatgaaatcttctcggatcgccaatcaaagagtagttattataaaagattaatgagttattcatcttgttttggtttactttgcttattttattcttatttgatttacaaggattcgggtttgtatttagcagaaggtctgtggagtatggaaggcgcaatgttttggaaagcatttttatttgaaactccatttgcccttctaaggtcgcttcccgctcttatggctgttgtcttcagcttcagttactataaagcgtatcgaaaatattcaatgttaaaagaacaataacgcggggaagttacattcaaagaagtaatcgaggattatatatctgccgaagccgggcgctttaacggaaaaaagcgccctgaatttgctgataaatcagatgactcaccttgttaatgatacatacttatttacaatggcttgagcgagacaagctgatgaatcaacaaaggtgagttcgctgcttttttgatccgtgaccatatttaaatccgtacatgcaatgataaccgtatcaaccttttctgctaagtcacggtgtaattcatcatataatgtaccagcctcattgatttgaccttgtttaatcttttctattatgtgatcgacatagatttgccaactatcttgatgtaaaaaatcataaccttctctgtttaacgcttcttgaaatattccagattgaaccgtaggaacggtggctaaaagagctgctttttttgaacctttagatattttttttatagtttcatcaaccatgtttagtaaagggactgaaagcgatttttttatttgattaaaatagatatgtgcggtattacatgggattgcaataaaatcaacacccgttttttcaagctttacagccccctcaataattgccttttccatgtccgtatgattgagaggtttattcatatagaaaggagtcggacaagaataaatcatcatatgaggaaaatccatatcatgtactgctccatatattttttggcactcgtctactaccttatctacaaatggcccagtagattttggccccattcctgccagtattccaatcataattgtcctcctctgtaaaaatatgtacgaatacgatcacgatgagttattcttgtgttactcatctgaatctgctctcatttctttttggctgtcttctcctattttatcatttcattaattgaattatggttaaaaatcggtgattacattgtgcccatatagattagtaaacgtgtcattgatgtcaaggcatgaactcctaaaggagatttaataactcattttcaacgaaaaactgatctctgttaattagtcgagattccaagatatacacggacaaattgatctttccttttttgggaatcccacaggttccctcttattttgatgttgttttttaaaaaagttattgacaccaataaatgaccatgttatcattaaaaatttgatatctcactccatatatggtaaccttaagttaagttaccatatatggaggtggattatatgtttcaaattggcgataacattgtttatccaatgcacggagcaggtacaattgaagccatagaagaaaaacaattcttggaggaaaaacaacagtattatgtcataagaatgtcaatcagtaatatgacagttatgattccaacgcgtaaaatattgagttcaagtatacggccagttactgatatacgtgcattaaaacacattatacacatttttcagcatggtgaatcagataggttactgccatggaagcaaaggtatgtagtaaacacgaacaaaataaaaacgggtgaaatacaagaaggcgctgaagttgtacgtgatttaatgcgaatgaagaaagaaaaagcacttaattcaagcgaaaaaaaaatgttggataatgcatatgaatttttgattagtgaactggaagtcattaaaggaatcactgaaaaacaaataaaaagtttctgctaaagttaattttaaataatgttttgcattccaaaaagcacccggaagttttcagaatattacgattagatgttcaacttcttaaacttacttttaaaacattaaccccttttattactcctacaatctaatctgttttatttttttcttcaatgaacatttgaattctcgatgaaatagtcacttgatttttgtaatcctgattcacactggcacggacatggagccgtaaggatggaagagaggcagggctttcattgttttaggtctaagtgattatttccagaagaaaaaacaaccactctcctctttatctttaaaaatttcttacaactgcttccacagtgaatagcagttgtttatcttcttttcataaaagagatatgcgaaatgtaacaaacaataacatacagttatattgagaacataaaaacaaatcatttatatatattccacatatcgtcaatccggtatgttatactgtaaacaatcctttgaggttttaaacctttttcttaccttgtagcatctgtccctactcgaacgttgagtagggttttttattcagtatgatacagagaacataaaaaaacaggccctatataaagagcctgtttgtataaacgattaaagattaagcagttttttgaacgttagcagcttgagctccacgagcaccttgctcaacgtcaaacgatactttttgaccttcgtctaaagatttgaatccgtcactttggattgcagaaaagtgtacgaatacgtcatctccattttcacgttcgataaatccaaaacctttttctgcattaaaccatttaactgtaccttgttccatttttgttgcctcctagtgtgttacacattgtattactatccttgcccaaagtatcatcaagacgaaaagtcgatattcatactatcctttacacgaacaaaaataattctcctttatcatatcacgaaacggaaataactgcaaattaataatgtgttcattcatgttttatttgttaaacctgtcgataccagtgcaaaataagatgcctattaatagctatggtttgaaaacaccgtgaaaatgaatcacgagtgccttcaaacccagtacttcatattgattgttaaaggtttctttaaaaagctcagctgtttcttgttcaagcacaagatattcttggctgttcactggtatagctttgtttctgcacatgtttccaaacgatcactcaggtatacccctattttaacggtattaacttgtcatgtttgttcctcaaacaatcaatgttcacgggctgattcccatagagaccaagagagagtttatcccgattaaaagctgggtataatcttcatacgctttgtatatcccggttggctctgctcataaagatgaattgagccaggaatcagttttcgcaatgccaatcattttacagaggaaaaccgattcatttaacagcttttgaaaaggctccttagctgacgggcaagttaaaacaaaaccataatacttatcataaatgtatgacagctgggacttcaaaggcaataaaacattttctatacgtagattgagaacatcaagggaggggaagcttttaaaaatgaatgaacaaaacctaaggactttgagaaaactggttatcccttatgaaaagtccgatttacaaaaaagtatttatcaaatcattaacacattggtgccatttttcctgttatggtgtttggcctataagagcttgtcgatttcttatatccttacattagcgatttctgtcgttgcagcaggttttttagtgagaaccttcattatctttcatgattgctgccactattccttttttaagaaccgaaaggcgaatcgaatccttggaacaattacaggaattctgactctgcatccgtttgatcattgggcacacgatcattctgtccatcatgcgacaagcagcaacctggacaaacgcggtacgggcgatatttgggtactgactgttgaggaatataaagaagcctcaactaagacaaaaataatgtaccgtttgtacagaaatccgtttgttatgtttattatcggaccgatttacgtcttcgggattaccaatcgttttaatcgtaaaggggcaaaacgcaaagaacggatgaatacatatgtaaccaacctggggattgtcgctttggcagcacttttatgttgggctatcggctggcaaaactttctgctggtccagacgccaatttttatgatatcgggatccctcggaatttggatgttttatattcagcatacgtttgaggattcatatttcgaagaagatgagcattgggaatatgtaaaagcagccgttgaaggaagctctttttataagcttccaaaagtcatgcaatggttaacaggcaatatcggtttccatcatgttcatcatttaagcccaagagtcccaaactataagcttgaaatcgtgcataacaacactgaaccattgcaaaacgttccgaccatcacactggcaacaagtattaagtcgttaaagttccgcctatgggatgaagaaggcaaaaaatttgttggttttacccacttaaaaaaaacttctaaaagccaagtatcatctcggctaacaacggattaaatacactccataatcgatgataatgggcagtgtatcttgcataataaaagtgcagactcgcgcaaagattttgtgcagaggtcagcacttttttaatgccaagcacttacaacaaaaaaataccaaaggtgtcaaaacccttggtatcattaggatgcggccgagaggacttgaatctccacacggttattcacccgctgggctctcaataaagtgaaactgtgttttctgttataaaaccattgttctaaacacatttgccgcactaatcgttatttatgtcttgatctattcaatcaagtttaatcgatattattcgaaagtgacattatgattaaactatcatgaaaataaacttctgtaatttagaagttttgactgaccccttaccgtacttaataataaatatcatgttgatagatgtattttaaaaaagcccactcacgaaaacgagtgggtttacaaaagctctaaacgtgataaatcccctttttcataaaagtaatcagctactctgattgcaaagttttcaatgtctccgtacattcttagaaggaagataccattagcgatgacactaatggtacccctttgtttctactcaatcacttattcagcttctccaacaactgtaaagcgttcatttatatgttttggattttcaatttcatccaatactgcaattgcatagtctgcatagctgatataactttcgcctttcgaattcacaagaagatgatcttttcccgactgataaaatccagttcttttcccgtctgggtcaaataccgctgaaggactgataaatgtccagttaatatcagaagtttcctttagttcttgcaagttacgaccttgccctttagctgttggaataaaaatctccgggaaatcaggtgtatccattacactgacagttttattttcgtctacataaagactccctgctccgcctacaattacagctcttgtacccgttccttttaatgccctaattaatgcccggccagcatctacatgtgcctgttcttctcctaatggagcaccgaaggcattaactattacatctaacttttttagatcatccgatgtaagatcaattatatttttttcaatgattgaaatcttttcctctttaagttttgcagcatctcttacaattgcagttacttcatgtcccctgcttaccgcttctttcaagataagacttccagcttttccggttgcaccaatgattccaattttcaatttaaagtcctcctaatcattcaaaattttaaatgtaaccatattgattacatgtaataattttagttacaccttatttatttgtcaatacttttatcatcttgttaattgagcatattagagtaaaagaacttgtaatacattcagttacaagtgtactataaagagtgtaaagtaattaggatggtgaagaaatcatgtctattagcagccgttttgctgtaggaattcatatattggctcttattgaaataaatgaagacggaattagcacttctgaatttttagctggaagtgtaaatacaaatcccgccttcataagaaaaattatgggaatgctgaaaaaagcaggtttagtaagtgtacggccaggtattgcaggagctgaattagcgaaggatctaactgaaatcaccttacttgatgtttatagagcagttaatgttgttcaagataaagaattgtttagtatacatgaaaatcccaatcctcaatgtcctgtaggccggaacattcaaagtacaattggtccgatatttgaaatcgcccaatctgccttggaaaaagctcttgggcatatcacaattgaggatgtggtaaaggatattattgaaaaagaaaaattgaccaataattgttaaatgattcacagaaaatcttttatcagactggggataaaaaaatggctttttcatgaacaaaaaaagagcagacataaagtctgctccttttgatgaaagatttagattacggtaagggatataaataagctcatgatacagaggaaaaattaacgacaatgcagacgatgccagattctttaatagggcgttgagtattactatccaacaactcaaggttcagaagctaagttcaaacaaagacttgaggaaatctcggattggtataaaagaaaccgcaaatcttagtttgaacgaatatgttctgtatataaaaataatgaggtatggagtgaattgataatgaattatgatgaaattaaagattactgcctaacctttccaaactcttatgaagaccatcctttcggagatggttggactgcaattcgtcacaaagggaataagaaaatatttgcacttatcttcactcgcgacgaacacttatgtgtcaaccttaaatgcgaacctgaaagggctgattttctacgtggtctttttgaagaaatcaagcccggataccatatgaacaaggagcattggaatactcttaccttagatgagggactcccaaagcaccaaatccatgacatggtaaagtacagctttgaactgacaaaaccaaaaagtaaaaaggaaacataacatcgaaggatagaacgctcaatatagatatccatccggtgcaatgatacacaggaatatgcaaaaacctcaaggcagctatttttaaattcgtatttacgagatgattttttcgttattgttagtcctttgtttcttgacataggttgaacaaataaaaaaagagcaaacacaaagtccactcaattaattaagatgattgctcatttcatccagacatctataaaaaatgaaaggtgacgatgatatgccacaaaggtcatttagcgtttaattaatactgataactcaccttcaaacactttttcctctttctgattataggtagataacaatacagtaagtatccccgtctggcttttatttggttttttatcaataaccttaacaatagtgtgcagcttatcattagggtaaacgggtgctaggaattttatattattcattcctgtcccagcaataatatcgtcttcatgacgcccttcttcaatccaaagcttaaaagtaatagataacgtttgtattccagaagcaataattccattaaatctgcccatttttgctttttcttcatttaaatgcatgtattgtgggtcatacacttctgcaaaattcattatattctcttttgttaattcaaaagatttagtttgaaaaacctgcccggtggtgaattcatccaatttcataaataaatctccttgaatctaaactttattattaaatctacgtagcattttaacatactggctctcacacaacaacttaacggtaaaacaattgttcccctatcaggaatgaacaagcacattgtttttgtttccttgcctttaacctcttataatcaggtgttttcttataaagaccaaggcggtcgccatcaccatcacccggcatatgtgccatttcctcataagaatctccaagcttctcataataagaataagcagtcagcctacgagaactttcttctggctgataaaacgcaagttgaatatatttcccgtcatcatatacacgaattatggcgttatctcttttgtgctcatctgaatctgctcgcatttcttttctgactttcttctcctgcttcatcacttcattaattgcattatcatatttactaccgccgcacgcagtcagctgaaggatgaaggtgactgacaaatcatacgacctactataagtaagtggacagtaacagataaatttctataaacaaaaaataccaagggtgtcaaaacccttggtatcattgatgcggccgagaggcacttgaacctccacgggttattcacccactaggcccgccatctatattcataaaactattgctcagttgtcagcttgttaagtaaattacgaatttccttgttataacttttaatttcttcttcattacaaccggttttatcaaatactgcattaggtatcattgtgactttttcattaaactcattcccttcagttgttaacgtaataattacacttcgttcatcctcttttgaacgctctcttataataagacctcgctcctcaagtcgttttaaaactggagttaatgttccggagtctagatataattcttcgcctaaacctttaacagatattttttccttctcccataaaacaagaagaaccaaatactgtgattagcgtacaagttctcgttttctgctttggaccccatatagaaaataaaaagccagctctccttcgggaaaagaactggcataacaaagcttcttgcttcttattttgctgtattgctcggaccttttaatttctcttcgttcttgcgtcaatgttttattattaggacacaaccaataaaataatgacgatcgagaatagcaacgctgcttttgcaaagcagtaagccctccagaatataaaagagctgcagttattgctgctcggataatcccagcttattctgagtctgtatttcgagtagccggtcaattaaatggatgtttttttcattccttttctgtttgttccattttccaccacagtgcatcttttggattttcaacagcttcttgaaactcagctttagaagcaactgttgggtaagaaccttttaaagatttacctgaagtatctttaaataaggttaacacaactattaagccaattaaactaactgctaataaatagaaacccggcgccaaattgtttcttgtcacatgggttaaccaagaagcaactaaaggtgttgttccaccaaaaatagaaactgataagttgaatgtccaggataatgtacgatatctaatgtcagtatggaacaacgcaggtaaagatcctggcatagtgccttcgtatacagataatacaatacctaacattaaaagtcctataaataagaatgttatattccccatattaagaaattgaaaagagataatcgaaaatacaattcctaatactaatccaattgatataacttttttatttcctaatttatctcctagtttaccgaaagttagagcgaacggtaccataataatcaatacaattgctgtaaccggtgtacttatattatcacttataccaaggttctcatctaaataagaaggcatataacctaacaataggtaattggttatattgaaaaacgccacaaatacgatacataaaaagatatcttttttatatgttttaatgacttctaataaaccgggttgttgttcttggttttcagagatgtcattttcaaagattggtgattcatctaaatgacttctcaaatataaaccaaataatcctattggaatacttaagaagaaaggaattctccatccccaactattcatttgaacatcagataaagtccagaaaagtactgtaactaaaacagaagctactatataaccagataatgtgccgatttctaaaccgctgcctaaccttatacgcttattatctggagaagattctgcgatatataccattgcaccagcgtactctccacccacagaaaaaccttgcagaatacgagctaagagtaataatataggggcccatacaccaatctgatcataggtaggaagcacaccaattattaaagtagataaagccatcattaaaatagtaattgttaatactattttccgaccaaatttgtcaccaactttaccaaaaataattccgcctaccggtctaagcaaaaaggcaattgcaaatgtagcaaaagtaaatattaactttaattcatcgttttgaactggactgaaaaagtttttactaataataactgccaaataagaatataaagcaaaatcaaaccattccatcgcgtttcctatccctgtagcaaacacgcttttcttcgctttttgaatgtctacaacgttaatttttttcttgttaaacttcatttaataatatcgactccttaattatcaaatccacattatacaagcgcataaacggtccaagcatgcagtcccagaatgtatagcgtaatgcttctctaaaagtctgggggtttctgtttcacctgatggagagctaacggcatagtggatgattggttcaactgtacttaaaagactagactaatatccatatcagcgccaaataacattgtaaaccaggaaagaaggatgaaattcagttttttcgctggtttccttaacttatttttgccgattggactaaaaataatacaataagcaacaaaaagagaaacatccaacagataataccagccaaagcggttagtgatatatccttgggctgtggttggtgttttctgcatactatttggagaaatgattccccttaatacagctctattgtgaatattatcacaatcgaaaaaaaacttttatttcttcaaagtgtcctaaacctttattttagttcttccattacgtcttccaatatgtttattataagattgaggtcgttcctaagaattatttactgattctatctttattaccccacaatcaggtgaaacaaaacactataaacgtaccatacctttttaaaatctgacaagcccaacagggtgatagaaacccggctaaagccaagctagtcaatggatagaagaaatttttttgtttttcccaaggaataaccgtctgcgtttaatccagcccaattagaaagaaaaagagcaggagtaatcctgctctttcattcaaaactttaatttgtatgacgaatgtcgtataccttttcgactttctttacctattaatcagtatgcagactacaacagaaataagttgcaccgggtatgaaataatggatgcatttaaacaggccaatcaccgacaattgaatttattgtatgacacctaacaaaattattttttaaatccagctggaaggcattagtagctaactataaatgatgaaaatatttgtgcgatgtctactgcagatgacttactttaggtaagtgggcagattgtgggcagtagatcatttaaaaataagcacaaaaaaataccaaggatctctctattacccttggtatcattgatgcggccgagaggacttgaacctccacggattattcacccgctggtccctcaacctagtaaaaacctatcatgagttacaaaaacttttattcaaagcatctgtttattttatttatacttattttcatcatttttcatgaattctgagcacaaaccggacaccgattagagaccaaggaaatctacatttcatcaagaaatatgtactcatcgccctgctgtaatcagtttcacatcatttatttcagcttccctcgcgaataccggatcaatgctcagctttaagatagtcaaccaatttctccgcactgttcttaacatcttcttttgaaaggtgaagtgtcccatattgtgtaaaggcaggaagaaaacgcattcctatatagttagcagtgacttgaaacggtctgataagctcgctgatcgtgatattatattctccgcctgcttgataatcagattcctgtgcgcctaaggagatagctaagagtagttcttttccatgcaatttagtacctccagttccataagcccagccatgtgttaacacatcatcttcccattgtttgagtaacgcgggactgctgtaccaatacattgggaactgaaaaacgatacgctcatgatctaacaggagctgctgctctttttctacatcaatgataaaattagggtattcaccgtacagatcatgaaccgtaatgtcattctcttgctttaaacgattcatccaggttttgttgacaacagacgtttccaaattagggtgtataacgataactaatgttttcatttgactgttatcctttcttcgccgattagttattattgcttttgcgataaagaattgaatctaattttaaaataacaacttatttacacctattttatcctttttcatgaattcagggcaactaattggacaccgattacatttatagccaaaaaaaaaggcttaaccttttaaaaaagattaagccttttcagtacccttatgcccctgccctattatctcgtgtctaaattctaatagctgatcatataacaaggcatctttgttttccctccatgcttagcaatactttctctgcttttgcaaattggagtttgaggcattagtaactatctataaataatgaaaatatttgtgcgatgtctactgcaaatgacttactttaggtaagcgggcagtttgtgggcagtagatcatttaaaaataagcacaaaaaaataccaaggatctctataacccttggtatcattgagatgcggccgagaggacttgaacctccacgggttattcacccgctgggccctcaacctaatgaaagcgtatcatgtattacataaaccttataaataaagcattctttatcttcatttccacttgttttcttctttttttatgaattttgggcaaaaattaggtgttactttttttaaaaaaatcactgaaaatattagctttaaatttgtaatttcagctaagacctaagtaaccactaacaagagaagtaatgtagtcccgcccactaggtgcgatagttttttcttttggtagtaccttggcttgtccgattttgtaattcagtgtagatagacagagtaaaaaagagtacgtattaatcttgaatagcacaaaaaacactacccttttcgttactttagagaaaggatagtgttttttcgttttgcgggtatcggaaaatctttgctagtagcagtacctcaataaaagaacccaatttccgcttacctaactatatcaaggcttacttgtctgatttgggatgtttggggtacaaaagttgagttacaaacattattatccaaaagaacgtttactgtaattattttacatggtactatttgtattgtgcatacggaatatgtatgtgtaataaatgaaattaaaaggagtgcttgatcgtgaatcttaagtccattttcaaaggagtaacatcgactctgatagctggtgcaattgttggaacttgtactatacctgcttttgcggagtcgactacaagtgtatcgtcgaaaaattatgcagttacaagtggagtattcaaagctctagacagggaggtttcagaagactctgttgatcaatcaagctggagtcgggagttcgaattagatgagaatgacggagcacaagtaaacttctggatttcaaataacggaagcaatgacataaaaatatcaattgacggaaaagtctcaagaaccatcgcaccaggcaagcaaggcagcatttctgccgaggttaaaaatggttggtttggttggacatacaattacacatttacagcttcaccaacggctcaaggtggtagtgttaagatgaaatataaaattgctcaaagaaataattaacgaattacggaaaggtaatcactcattacctttccgtaatttcattttttttagttttttaaaagattccttactttctatactttggagataaattcactccaggtttttttcaacttctctttttctggaaaaaaaaggttttgtattaaatcctatatgatgcaaatcaaaccgattagtaattacttttctccaattttcttctcctgcttttcctgctcttttcccctcagccttatgaaatattatcctgtcctatatttaagggttatacagcgctcattatcattatttacaccttttttaatgttttttcatatcttctggacagtaaatgggagtaaagaaaccttgaccactcaccaagataagtaaagtaaacaaaacgaagggcatcaaactagatgacttactataagtaagggggcagtaacagacaaattttctacaaacaaaaaaataccaaggatctctattatccttggtatcattgatgcggccgagaggacttgaacctccacgggttattcacccactaggccctcaacctagcgcgtctgccattccgccacgaccgcgtgctatgaagctgtctttccactaagcatataagctagtgatgatgatcagcactttgaaaataaagtgcgggtgaagggactcgaacccccacgtcgtaagacactagatcctaagtctagcgcgtctgccaattccgccacacccgcgtgacaagtggtgagccatgaaggactcgaaccttcgaccctctgattaaaagtcagatgctctaccaactgagctaatggctcgctctaaaagtgattcaaaaattttaaataaaatggctgggctagctggattcgaaccaacgcatgacggagtcaaagtccgttgccttaccgcttggctatagcccaacgaaggtaaatggtgacccgtacgggattcgaacccgtgttaccgccgtgaaagggcggtgtcttaaccgcttgaccaacgggccgtctggttgagaacttatctggcggagaaggagggatttgaaccctcgcgccgcttacgcgacctacacccttagcaggggcgcctcttcagccacttgagtacttctccatatggctccacaggcaggattcgaacctgcgaccgatcggttaacagccgatagctctaccactgagctactgtggaataatcagactttctttattataaatgatgcgacatattgtgtcaagaagcaacatttatttttttaagaaagtgtcgttgtctctcaacgacttttataatttaacatagaacattaaaatgagtcaagcctttttaaaaaattcttttgattttccctctgcattttccgcaggcatatctttccgggttcattgcccgcttctttatatactgttggccgcaagccgcgcatctatacatatatgttttcttttgtggctttttggtttgcagcggcgtgcagaatctcggcgctccgactttctgaagcaattctctgaagtccttgtctctgtgcttgtacccttttccttcaaggtgaaggtggtaatggcacagctcgtgtttaatgattccttccagctcgctctgcccgtgttcgagaagatattttcggtttaattcgatgttatgggaagacagcatgtaccggccgcctgtcgttttcagccggtcattgaaaaaggcccggtgacggaacggttttccgaaatcttgtgcagagatgtcttccgtcagcttttgaagttgttcgttatccatatgtgcaccccgctttaaaaacattgaacgggacaattcaccgttcgcatacaatgagttaaaaccgacctctaactaaaagctgaggaggaataagccatgccgaattggctgatgaaacaaatgcaaaaagcgtttttagaaaaggacaattaccaaatcaaactgctgaaccagtgctggtatttctacagaaaaaaacactgctcgtaagcagtgcttttattttaccatagacagcgacactctgcctttttgcacgtccaccccttcgacccatacggtgacgatgtccccgaccgatacgacgtcgagaggatgtttgacgtattgattgctcagttttgaaatgtgcacaagcccgtcctgtttgacgccgatatcgacgaaagcgccgaagtctacaacgttgcggacggtgccctgcaattccattccttcctttaaatcctcaagctgcagaacgtcttttttcagcaaaggcttcggcacttcgtcacgaggatctcgctccggccttgtcagctgcccgcaaatatctgcaagtgtaatttcccctataccgagctcttcagccgtttcagacagcggcagtgcgcttattttcccttttgcgtccgcgcttccgatctgatccgcagtgagctgcatttttttgagcagcgcctttgtctctttatagctttccgggtgtatcccggtgcggtcgagcggctccggtcccccgggcactctcaaaaagccgatgcactgttcatatgtttttgcgccgagacgcgggatttctttcagctctttgcgatttgtaaattttccgagctcttccctttttttaacgatattaccggcaacggttttggataacccggctacatattgaagcagcgcggctgatgctgtattgacattcaccccgacttggttgacgacggtctctacgacaaaacggagtgattcatttaaatgcttttggctgacatcatgctggtattgcccgacgccgacggatttaggatcaatttttacaagctcggccagcgggtcctgcaacctccgcgcgatggagacggcgctgcgctcttcgacctgaaaatccggaaattcttcacgggcgatttctgacgcggaatacacgcttgctccggcctcattgacgatgacataataaatgtcccgctctgtttctttcagcacatcaacgacgaattgctctgtctcccgtgatgccgtgccgtttccgatcgccacaacctcgacttcgtaccggtccagcaattctttgatttttttccgggcttccgctgtcttttttacgggagcgtgcgggtaaatgacgtcgattttcagcacttttcccgtctcatcaacaactgccagtttgcaccccgtacggaaggccggatcgacgccgagcacaactttccccttcatcggcggctgcagcaggagcttacgcaggttttcagcgaaaatatgaatcgcctgcgcgtctgctttttctgacagctctttgcggatatcgcgctcaatagccggctggatcagacgtttgtaactgtcctcaatggcttctttcagcgtttctttcacaggcgtttcacggtgtttgatgatttgcttttctaaataagcttttatctgatcggcgggcggttcgatcgcaatctttaaaatgccttctttttcaccgcggttcatcgcaagtactctgtgaggaacgaccttttggatcggctcttcgtactcgtagtacatttcatagacgtttttctcgtcatctgcggctgacttgcctgttgcggaagtgagaattccttttttatacgtttcctggcgaatccactttctgaaatgaggatcatccgagatttgttcggctatgatgtgcttcgcgccttcaatggcctcctctcttgaagcgacttctttttctgcactgatatattgatcagcgatgtcgtgaaggcggttttctttcgggagagaaagaatgtagtccgcaagcggttcaaggcctttgcttttggcgacggtggcttttgttttccgtttttgtttgaagggacggtataaatcctcgacttcctgaagcttgaccgcttgttcgattttttgcttcagcccttccgtcagcttgtcctgctcagagatcaatctgatgacttcttctttccgctgcgtcaggttttgtatgtattgccaccgctcggagattgcctgaatctgcacctcgtccattgagccggtctgctcttttcggtaccgtgcaataaacgggacggtattgccgtcttccagcaggcggatgacactttcgacatgtttttgggataatgctgtttcttcagcaatttgttttttcaaaagggctaacgtttccatatcacaaaagcctccatctcttcattctttctctagtgtatcaaaaaacggcggaacataaaaaaagcagccttacgataaaagctgccctagaatataggtcaaatcatcacgtctggatgttgtgtacggatgaagtgattttgatatatcttctattgagtgtccctgctttaagcaggtgcggatatgcggaacctcaagcccatccgtgtagatgatgaacctcgcccctttttcgtatgatgacgtatacgttttgtatctttgcggtttgcctgagaggtaacccgaaatcggcagcggatgaaagacttcgcctgatggggagtgcaggaagaaacggacattgccgatcgagcagtatgtcaattcccttttgatgaaattgatttttaagatggaggcagtcgcccctcttttgtttttcatcgcttgattgcagcgctcaatgatgctttccacatcctcatccgcatacgtttccacgatgtctttaatggctgacgaggattcgttggcaagagatccgctgccgagaccgtccgctaccgcgcaaactaattcttcttcattcgccttcataaaaaagctgtcgccgcatatggacttgccttctttatttaattggtatacaagagtttgaacatgttcattttcttcaacctgaatcattacattagctccatggagggatctccaatcaaggcctctctcagttttttcaccgctttccgctgcaggcgcgagacgtgcatttgagatattccgagaatgtcccctgtttctttttggcttttattttgcacaaatgttagatcgataatttgtttttcgcggtcggacagcacatgaagcacgcttttgatcatcatctgctggttgacgcgttcgtatccttcctcctgcgaaccgacgatatctaaaatcgtgacggtgcttccgtccgcatccgcttcgatgctgtgatcgacagacagcgcctgatagctttttcccatctccatcgtttcaagcacttcctcttctgacacatcgagaaaggctgcgatttcttcgactttcggcgaccgctgcgtctctgtcgtcagctgatccaccgccattttaatgcgcggcccgagttctttaatccgtctcgggacgtgtacgctccatgttttatctctgaggaagcgtttgatctcgccgatgatggtcggaaccgcaaatgcttcaaaggatttgccgacctcgggatcataccgtttaatggctccgagaagtccgatcatcccgacctggcggaggtcttcatgaaagctttttccttttgaatatttctttgccagcatttcgacgagattggtatacacctcgacgagtgtttcctgggcttctttattatcatgtgtttgaaagtcgcgtatgagccgatcaacttcatctttagttagtttcgtagtttttgatggttgtgccatgatcaactcgctccccatttaaatactttgtcatcgccacggttacgccagagttgctttgaactttgacttcatccatgagcgtttccattaaatacagaccgagccctccttctgacaattgatcgactgtgtgcgaaggtgtgtacggcccgagatcctgctgcttctgatcaaaatcaaagctgtctccctgatcggcgacaatgacctccagccgatcctcaaacacaccgaaccgcacggatacttctcccttattttcatcgttgtatgcatgctggacagcgtttgtacaagcttcgctgacagcgatttttagatcttcaatgtcatcataggtatagcccattctgcttgcaacccctgataacgtaagcctgacgattcctacatattccggttcggccggaattttcatctctatataatcaactgatgtactcattgcacgccaccttctgactttgccgaaatgtcgatgatgtccttaagccccgtaatttcaaacagacggacgagccggtcggaaagattctcaagcttgagagagccgccttccttgctcaccgttttaaacacgcctacaaaaacgcctaaacccgtactgtccatataatttacatcttttaagcagattctcatgtccttcccctcgtttgccaggggcatcagcttttcacgaaccaccggagctgagtatacatcgatttctccagcgatattgatttgtatatctgaaagattctccttcatatctaccgttaaattcatcgtatcacctctgaaagttatccttactcgtgctaatggctttttacccgtgctgctgtttttttaaacctttcttttcaaaacaattaacgtaaaatcgtcatgaagctgaaagtcctggagtctcagcaggctgtcgtaaatatttttgaccatatcctgcgcggagcagtccatatgttcttccagcatgcgctgaatgtcgctgcgttctaagaaaccgttttcggtacggcattcggtgacgccgtcagaaaaaagaacgatcatgtctccttcgtccatgtgctgttcatattggctgtaatcaaaatcctgagaaattcccagcaccaatccttttgcctccagatcataaaactttttttctttttcagagtagtagaagcccggttcatgccccgcagaggcatatgtaaattggtgatttttcgtattgtagtttgcgtaaaacatggtgataaacatgcttgagtccacgttctgttctacaacgcggttaagatttttcagcacttgggaggggtgaatgccggtctccggaagagagtccatggcatacttgatcatcgacatgcacaatgcggcgggtattccttttccaatgacatcggctatcgcgatgttaatcgattccttgtctttgacaaagtgataataatccccgctcatctgtttggcggggacgctgatcgccccgatatccagatcttcttcttcaggaatttttgtgccaagcagcgtctgctgaacatttgcggcaatttcaatttctgaacgaagctcctgctggatatctctcagactttgatgttcctgataagccatcccgtagccaatcatgacttctattaaaaaatccagcgaatgaaaaacatcttccggcagatccggatacagttcctttactacttttcggtggatgctgatgatctcctccggaggaacctgatgttcaatcgtttttcggctgaatttttgggcttgatataaagatgtttctgttaattcggctatatatcggctaagcagctgatgataccgctgctctataacctccctgaaatccacgttctaacctcctaccgaagccatttcacggcttgaatctctgttccttcctctgcaacagattgcaggctgaattcgtccatcagccttttgacgcccggaaggcccgctcccagtccgcctgacgttgaaaagccgtcttccatcactttacggatgtcggggattccgggtcctttgtcttctgctataattttaaggccttttttccctctgtcgtttacttgttctatgctgacctggcccttgcctgcatataagtaaatgtttctggccaattctgagatagccgtcgtgattctggcctggtccaccgtgccgaagcctaattccttcgcaacgttgcggccaagctgtctggcggctacgatatcccattctgtcatgattttcacacaggattggtcgttcatcgctattcccccaattcccgcttcaatgtctcaagcccttgctctaaatcgagcgccgtttcaatttcctcaagtgagattccgagttcaatcaatgtgaccgccacagccggctgaattcccgtcaatacgacatttgcgcccatcaatttagacatggtgatgacatcgccgagcactttcgcgataaatgaatcgatcatgtcaacggatgtcaggtcaatgacgaccccgtttgcgccggtttcatagattttgttcagcagatcttcttgaaaatgcaaagctgtctggtcgtcaagttcccattggatggataccaataagcagttatacagtttcaggatcgggatttttggatgtctcacaatgttattcccccaatgaaacgatttttcgatttgtcatttcaagcgctgtttgaattcctttttgaagggtattcttcgtaataacctgcgacaaatcaattcccagattaacgatcgtctgcgcgatttccggacggattccgacgagcaggcatttcgcgccgacaagccgcaccgcttctgatgcctgaataatatggtgcgccaccatcgtatcaacgaccggcacgcccgtgatatcaattaatacaacctgtgaacggtgcttcacgacgccgtttaacagattttccataatgtgctttgcacgctccgtatcaatcgtcccgacaagcggcatgaccgttacatgctcaaataccgggatcagcggagccgacaattcctgaagcgcgattttttgcaaagtaaccgttttttcccaggagatagaatactgatttaagatctccgtgttgatcggattgaaaaagctgtctatttccaaaatcaaatctgctctgtcctgatcggccatattaaggtcgaccatcgtttcgtaaagcagtttccaaaactctgacagggtggctgaaagaagtttcagtgacaggccgagctgaacggcgcgcagtgcgagttcactgatctgctcttccgtagcctcgtcatttttagtcgataataaaagaatgtctatatagtctttacaaatattttcacatatgtgattcgtaagctgatagtcttcctgattgcctacttcttttagtttggctgtccaagtatcaagcagttcatcatgctgatcaatgatgaactggtacactttctgattcgacatgggtttcactgacctcccgacacaaaacaacaaattttgtttgattatctctttattatagcgcttatgtttttcgaaaacaaaaaaagttgctctatatgagcaaccaaaatatgactaaaaatcaatgagtgccaaactgatttgcaaggcttcatcaaccttatccatcatttcatcatccagatgagttattttatccgttaatctttgcttgtcaatcgtccgaatttgctccagcaaaataacggaatctctttcaaaaccgtagcgttttgcatcaatttcgacgtgggttggtaatttcgctttctgtatttgggctgttatggctgcaacaatagcagtcgggctaaagcgatttccgatatcattttggatcactaaaaccgggcgtacgccgccttgctctgagccaacaacaggagataaatcagcaaaataaacatcgccgcgctttacaatcaaaatgattatcctccgctgactaagcgctcaacggtcgtttctgcttcgcactcagcatagtgagcctcagaagagatattcaagttgattttcgccatttccatatacccgcgtctcatcaaatcacggttatggcgagttgtccgttcgctgacatacgctctcactgcttgtgatatcagttcgtttctgcttcgtttctcccgcatcgctacaccatccaattcagctactaagttttcaggcaagctgattttcatttcggttcttgcgctggattcagacaaaaaacatacacctccaccaaacttacggatacgaccaatacatccatccagacataatgataccattattcaaacgtcaagcaaagctgttttataaattctctttttccggatgacggctacttgtttgtattatcttgcagtaaaggatttcttacttccattatactctcattttccaaaaacatacggggaacgcgggaactaatggtacaagggacctcgtaattaatcgtctcaagccgccctgcgatttcatccatcgtgatcgtttcttccttctggctgccgatcagggtgactttggtgcccggcggataagattgatctaattcgaccatcaattgatccatgcagattcttcccgcgatgttcatccgtttgcctccgatcagcacagacgtgccgctcagcttgcggagccacccgtccgcatagccgatgggaaccgttccgatccattgatccttctctgccgtatatgttgcgccgtagctgacgctttcccctttgcggatctttttcacatgggataaaacagagtgcagcgcaaaagccggttttaattgaaacggaatttcgctttggatgtcagcagaaggacgaagcccgtacatactgatgccgaaacgaaccgcgttaaagaagccttttttaagacgaagtccggcagcgctgttcgcgcagtgcaccatcaattcttttaaaggaagcggagcgatcaattttttaaagcggtcaaactggaagaggaaataatctctgtttttctcatccgcggtagcaaagtgggtgaatacgcctttacagactaaaccgggattttggctgaggatttttaacacgctttggatttcttcctccgttttgactccgagtctgttcatgccggtgtcgactttcagatgaaacggcactgtttcacttccgaggtggcgcacagcttcttgaagccattcaacagaataccccgtgagtgttacgtcatactcggcagctgcttgtacatattcgggcggcacggcgccaagcacgagaatcggcgctgtaatgccccgttttctcaatgaaatcgcttcatccagtatggctacggcaagacaagaggcacccgcttcaagcgcggctttcccaacttccaaatctccgtggccgtaagcgttcgcctttacaaccgccatgagatggacgttttgcccgatgtgttttttcatatgcgtgacattttctttaatcgcggacaggttgatttccgcccacgtttctctgtaaaaggatgctgtgttcattcgatacacttcctagcattattttcaattcatattgttattatcatactaaaattattctgcaaagtgaaatggaatcaaaaaagagaccgacagcggcggcctcttttttgacgttattttgacgactgtccctgcatgcttttggcggcggccaccatttcatcttttgtcagatcctgtgatgacagaagataatccactccgtcatatgtccacgttaaagacgtatcagataatgcggccaccgtgaagccgagattaaccggttcgcctttcagcgtgacggcagaggcggcttttgcgatatgggctttttcttgaataagggtgaatgatttttctccgccgtaagtcatgacgatccgtttgccgtccgccgttgaaatatctttctcttcaagctttttgacgccggccggcacttgaagcggtgttttgaccgcaaatgaatcagacggcttggcgcttgtggcgacgtccatctgggaaagcgtcatatttttcttctcgtcaaaagagtctttatcaaacggcttgttgaattcaaagcttttgaattcgacttttaccatcactttccggtctgtatccatgactttgacgagcgatgggctcatgtcctttttattgaaagtgatttcctgagtcggcagcattttgttgtgctgatagtttgtttttgtttcaaacgtgtactttttatctttggcggaatagacggcgtctttgtcatgctgcacgtcctttacaagtgactcaaacaaatatacttggctgctgttattcggccagtcgctttggaagcggaagctcttatttagagacggcgtgaggacaaagactccgttggcgttccgtaagatgacttggttttggtcttttttcggattttccaaatagacccggtacagggaaggttttttatgccagatttccacattgtatacttgcggatcactccccgtttcgatggtcattttggctttcgctttgtacgaggtgtattctttcgccttcttatctaaaccgttcacgatatcttcctgtgatttttggccgcaggccgaaagaataaggacggcaagcagtcccgttaaaagcaaaacaaagctttttctcaccttttttcaaccccttcttctcaattgatgtaaagggaagaaatcgcttgtttgactttaacggtacgccctgaacggacggacgcgtaccataaaagcctcaaacaacttgtctcccttaatgcactatcaaatatatgaaggggttccggctaatatgcagactagcgtgacaacctttcaatcacgacctgtgccgcggcgtattcttttgtatgggtaatggagacgtgaaccgccgcgccgtcaagcttggcgcaggccagcacaggctttcccgccgtgtcgtttccggtttcaatatcctgaaagctgagctctttgccgatacctgtgccgtatgctttcgaaaaagcttcttttgccgcaaatcttcccgcgagaaattcaattttccttttgtccgacagcaatgtaaaacgggcgtattcagcctccgtcaatattctttgcggaaacctcgcctgccggctgagcatgttttcaattctgtgcagttcaacgatgtcgattccgattccgaaaatcatgtgaattcctcctaaaagtccgtactaaaaaacggtttatgtcataaacgtgttactatatatgtaacaaatcagatgcaaaggggcttgcgatgtttatacgaacggaaaatttccagacttttatcagacgttatccggccgtcagctgtatcttggcgctgcaggcgttcttgtggctgtttttcagtatgccgcttcattccgtcatgatgtggtcagatgctgtgaccggctataattacggcgtttcctcgggagaatggtggcggctggtgacaccgatgtttttacacgcgaatttcactcaccttttgtttaactccatgtctctctttttattcgcgcccccgcttgagcagatgctcggaaaagtccgttttctgattgtgtacatcgcatcgggcatcatcggcaatatcggcacgtatcttgccgaaccgcttgattatgtgcatgtcggcgcatccggcgcgatcttcggacttttcggcgtgtatgtgtttttgagtgttttccgcaaggagctgatcggccgggatcagtcgaaaatgattatgaccctgcttatcatcgcggtactgtcgacgtttatcaactctaatattaacattatggcgcatttgttcggactggcaggcggatttttgctttcctttttatgcgtgcagcaaaaaaagcggcggtattaaccgtccgctttttcatatgaataccagcgcccgatgcgttcggcatcttcctcgctgacatccttcagcatgacatgctccatgtggtgagctgatttcactgcggtagccacagatgcgagccgccttcttttttgcagaaaggagcggctgacttcaaacatctgcattcttcttctcagcataatcgtggtcgtcttcccgaccagcctcgtggtgatctgaagcctgccgccgtttatgcaccatgacgctgtcctaaacgaggcatatccaagcaccagttcggcaggaagcacgaggagcgatgcatatccccacggtttaaacagaatacaaagcgggatgatcacgaataccgagaagattatggatcggaataaataccggcgcagcgcccttttcggcaaatgattccggttttcttccagcacgtaatccggtgtgaaaccattcagcatcactccgagctttgatttgcggatgatcggaaacagaatcgtctgtgctccttctttctcattccccgcactgccggcgctgacaatcgcaaccgtcgcgtatccgaataattgcctgatcacattttctttcattttaatggcttggattttacggagcgggatcgtcacttgatgcttttcaataattcctctggtaatgaccaattcgtgttcttttttttctatcttaaagttggcatgcttgatcatcataccggcgatgcttaacagccaggcgatgaacaatcctatgaaaatgatcacggcgtatatgccgatgctcgcatgcttgagaaaggagaacctgtcatagagccagtccattggaagtacttcatcaatctgagaaaagagggcgaatactgctgagatgatgacaccgattcccccggatgttgaggcggccataagcagctcacctacagacaggcggtaaacggattgcacatcttccccgcgcatcggctcctgctccgctgcggtctcccctcgttcttcctgctccgctttttgctgaaaaacagccgctctgatccgttccgcctcttccacagtaatggcggataagacagcctcggcgtttttcccgtcgccggccgtttcgatttgaagcttaacaagcttaaaaagctgctgaatgatgccggcactcgtattcattgattgaatccggtcaatggagatgtatctctttttcgtaaaaaacaagccttcttcaattctgaattctccgtcctcaatccggtatgtaaattttctccactcgatcacactagccgtaatcagccagataagcaggacggcgagcgcaatgcctccgtaaaagcggatgaagtggttggaattaacaatatagacgagaaaaaatggcagaataatgtttttaatggtttcgataatagtatggaataagttcaaaatcacggccgccgggtgcagacgtttcggctcagacatcatcttccgtcacccttgccagacgggaaatggaatccctcagccggtcagcttcctccatatcaagcgccggaatggaatgaacggttgccgccgtggagattttgactgaggccagacggtaccttctgaggagcgggccttgtgaagtatctacgtgctgcaccctcaccatcggcacaatgacccgtttgacaataaaaatgccggattgaatatcaatttcattttcatggacttcatagcgccagatcctgtgcctgattttcggtatggcatagacggatatcactgaaccgaagatccaaatgatgccgaggactccggtgatccaatacggccaatggaagaaatggcttaaaacagctgctgctataacggccagaagacagaaggcggacaggatgatttcctgaagacgccagacttttaagccgcttggactgattcgattttttggctgtgctctcaacatacctacctcccattttttatcatacatacaaatacggctgatttgcaaaaaagattcactttccggcatatcaaaaaaaagcggaccccgtaaaagggtccgcttcctgtgtcttagtatgattttttctggcgtctgtcacctgaagaacggcggtcgcttgagcgttttttatcgtaggaagaacggttgttggttttccctttgccgccgcggtagccgccgccttggccttctctgcgcttagaagtacgctggtttttatagcgtttgctgaccatcggcgcttcatcagtgaggcgtacaggcgtgctgtccggctcttttgtcgccattttaatggctgcagccacaactgtcactgcatcatgatcttctaacaattccgcagctgccgtcatgtagaagttcaggttgttttcgctgatcgccgtgcgcagacggtcaaccgtcatctgctgctgaccttctaatgcttcgtcaagcgtcggctctttcatgcggtccattttgcgttttgtcgtttgttcgatcgcgcgaagcatgtttttctcacgcggtgtgataaacgtcatcgccatacccgtttttcctgcgcgtcccgttcttccgatacggtgaacgtagctttcaggatcttgaggcacgtcaaagttgtaaacgtgggtaacgcctgagatatcaagtccgcgggcggcaacgtcagtcgctacaagcacttcgatcgcaccttctttaaatttacgaagcgcaaccatacgtttcgcctgcgttaagtcgccgtgaattccttcggccgcatatccgcgaaggttcagggcttcagcaagctcatcgacacggcgttttgtacgtccgaatacgatcgcaagttccggagactgaatgtcaagaagacgagtcagggtatcgaattttttgcgctcctgcacttccaagtagaactgctgaatgttggacacagtcatttctttcgcttttacttttacgtgttccggctcagtcatgaaacgctctgcgatccgtttgatcggcgcaggcattgttgctgagaataagagcgtttggtgctcgctcggtacatttgagagaatggattcaatatcatcaatgaatcccatgttcagcatttcatcagcctcatccatgacaaccgtattcacgttgtttaaacggatcgtacggcggttgatatggtcaagaagacgccccggcgtacctacgatgatatgcgggtttttcttcaatgcgcggatctgacgtccgatatcctgtccgccataaataggcagcactttcgcacgcttatcttgtccgattttatataactcttcagatacttgaatggctaattcacgggttggcgcgattacgattgcttgaatattaggagactcggggttcattttttcaacaaggggtataccaaacgcagctgttttacctgtacctgtttgcgcttgtccaatgacgtctttatttgaaagtccgagcggaatcgtttgtgcctgaatcggcgttgcttcttcaaaccccatacgattaattgccttcatgagatcagaacttaattgaaaatcttgaaacgttatagtcaaattattcaaactccttctaattgctgtttcagtaatgtcgtgatttaccactaaaaaccgccctttcatccaaaggacaggatcatacgtatacaaagcccgaattactttacgtttaatcttaccattacactatgtgtttttcaataaggcgagatggtcaggcggccggaagcggcctgaccggattcttcccgcgaacgaggccggcccccgcgccggacgggatttcccagccggcggtctttctttttcatacggacagaattatttcaccctgaattagtttcttcatttttgtatatttttataatgctgatcagtattttttcagttcttctctaataaatctttaacgatttcttcgagcttcatacctctcgatgctttaaacagaaggagatcgccggaagcggccatttcctgtatggcgtgaagcagttcttttttgtcaagataatggctgacgcgcccttcttcaaaatgccggcgcgctccgtcagcgatgaatgcgccgagtgtgccgtaagtaaatacatggtcgatttccttcggattgaccgcagctccgcattcttcgtggaatgctttttcttcatcaccaagttcaagcatatcaccgagcacgagcattttcttccgatagcctttcatcgtttcgattaattcgaccgccgctttcattgacgtcgggctcgcattatacgcgtcgtttacgatcgagatgccgttgtccgttttgaccagttccaatctcatccccgtcaccttcaggcggctcagtcccagagcggcattttccggcgtaatgccgaaatagatgccggcggcgtatgcggccatggcattcatcacattatgtctgccgagaacgggaataaagaaagaacggtcgaccccgtcgatattaaagtacgtgccttcttccgcctgttttatttctttcaggcggagatcattgtccgcgcctgcgccgtatgtcgttgtccggcaagtgtacgccttttggcgaagcagcggctcatccccgaaataaaacagaacgccgtcttcccgaagtccgtttataatttcaagtttcgcctccgcaattccttctcttgagcctaaatcctgcatgtgggattcgccgatattggtaatgacggcagcttccggttcagcaagacggctcagaaaatcaatttcgcccctcgcgctcattcccatttctaaaacggcgatttctgtatcttcaggcatggcaagcacagtcagcggcagaccgatatgattgttgaaattgccggcggttttgtgaacgcggtactgagtgccgagaacggcgtgaagcatgtctttcgttgtcgtttttccgttgctccctgtcaccccgataacccgtgtgccgagctctttcaaataagcttttgccaatgtttgcagcgcctccagcgtgtcatcgaccaggatgacagcacgctcttccggcggattcggttcagagcggtcccacaacacagcggaaacgcctttttcgaaagcctgcggcacaaaggtgtggccgttaaaatgctcgccttttaaaggaatgaacagctgatttttttccaaagtccgcgtatcggttgcggcgccctcaatcattgtttgttcaaatacgggatttgtcagtgtgcctttgaccatgtctgcaattcgctttacagttcgctttatcaaaggtggcacctcgctttctgaaaatgttatctgttacgggaaaagacactgccccttcaggcagtgtccgtcttcattaaaatgtatgtttaatcagctgtttttcggcatggcgttcttttgccagctcaaccagctgttcgatcagatcactgtaatctacacctgcttctttccaaagcagcgggaacatgctgaatggcgtaaagcccggcattgtgttcacttcgttaatgagcacttgaccgtcattggtcaggaagaaatcggcgcggacaaggcctgatccgtcaatcgctttgaaggctttaatcgccatttcgctgatttccgcatattgttcatccgtcacttgcgcgggaatcattaaatccgtgtcgccgtcttcatatttcgccttgtaatcgtaaaagtcggttttcggcgcgatttcaccgacggcggagcatttcggttcgtcatttccgagtacgccgatttcgatttctcttccggcgattccttcttctaccacaattttccggtcatactcaaaagccagttcgaaggctttttcaagctcttcgcgatttcggcatttgctgattccgacgcttgacccgaggttcgccggtttgacgaagcacggatatcccagctcctcttcaacctgctgtaagcagctgtccggcgtctgtttccagtccttttttaagaaagcggcgtacttcgcctgcggaagccccgcttgagcgaacaaatgcttcatgatgactttatccatgccggctgatgatgcaagcactccgttgccgacataaggaacgttcagcaattccagcagaccctgaatggtgccgtcttcaccgttcggtccgtgcagaagcggaaatacgacatcgatcggcgccttttcgtcaggcgacgcttcaggaaacatttcccggttcaatgctgatagagcaaaactttcaccgttttgttccagctgaagcattttcacgttggaaaccggctcagtcagcagcgggcctctttgccattctcctttttcagtgatgtaaatcggatgtatatcaaacttctcagtattaagcgcttttgttacagctaatgctgtctgcagcgatacattgtgttcggctgactttccgccgtacaccaatcctagacttgttttcaatggatattccccccacaacaattcatctttactatcttatcactttcctcagaaaatgatctaattatttttgggcattctgaatatgaaagcatttgtatgtaattcctttttattttatattaaaatggcatggaaaaggagatgtgtcatatgaaaaaaatcagtacaacagaacaatttaatgaacttattcaatccgacaaggaaatcatcgtgaaatttttcgctgactggtgccctgactgcacgcgcatgaatatgttcatcggcgatattttggaagaatataatcaaaatgattggtatgagctgaacagagacgagctccctgagcttgccgacaaatatcaggtaatgggcataccgagccttctgatctttaaaaacggtgaaaagaaagcgcatcttcacagcgcaaacgcgaaaacgcccgaagaagtcacagagtttttatcacagcatatttaattcgtttcacgatctttgtttatgacttcaggctctacatgaacatggacatgagtcacatcatgttcatgttttattgcatactcgacttcatcggctacttcatggccttctttcacagacagcccaggatctaccgtaatgaccatttccacatgaaccgtgctccccaaataccttgctttcacatccttcagcctgctgacctcttttatttctttcactgtgtgtttatacggctccaaatctttcagatcaaacccgtccgtcaatgagtgggaagcatctttgaagatgtcccatgccgtcttacagatgatgattccgatcagaaaagcaatgaccggatcaatccacggcagatgaagccgggccgttaagacgcctataaacgccccaatactgacataggcgtcagaacggctgtctttcgccgccgcatgaagcgcagaacttttaacccgatccgcaagacggctgttatatacatacatgccgtacattacaatcgcgcttccgagcgccgtccatgccgcgatgaggctcggctcggcctccgttccgctgacaatcgcctttgctcctccgatcagcacttcaataccgaccgccatcataataaaagacgcaattaatgaagaaattgtttcagcccgataatgtccgtaggcatgatcactgtcagcggggcgctgggaaatccggagcccgatcagcacagccagtgatgcggcaatatccgtggcattatttaacccgtccgctctgagcgcttcggaatgataaataagaccgatcaccagtttgacggcggcaaggatgaggtacgcggcgatattaagaatcgcgcctttctcaccccgttttaagtttgccgtttgatcattcatgtaaggactcctccattctcattcatagtatggatggaaaagcggaaaaatagcagctttgatctgtcagaatcaaatcaattcgacagcattattccccgggaaactttttgtcgaaaaattggcggtatttttcctttacatatgaatatgcccattgtatactttcattaattgataatgattctcaatatcatttgattaggagggtaatcatgaggtcttctcctcagctcagatcatcagttgaaggacgaaaaaaacatctgatccatttgctgatcaataacggaatatacaaaaagtcggaacggcatttatatgaattatcgctcggagaattagaaagcgaatacaaatatgttaggaaggtgcggacttatggcgaaacgtaaaataaaaacatacgaacagctgataaaagaaaacaaggcggccattatgaataatcaaaagctgatgaatgtgatctatgacagaattgaccgcaagcatcaaaaactgctccggcacaacagccatacataaaaagagcctttttcaggctcttttttttattgctcaaaggcttccgccgctaatttgccgatgaccgcatcgtccatcggcggattgtgaaggccggcccgggcatcccgataataccgctgaagcggattgtttcgctcaaggctttttgcgccggtgattctcattgctttatcaacaacagaaaggacggcatttgtcacaatatgttttgcggcgccgagctcgcttttgatgaaagggcggcgtttcgggtcatcatacatttgcgccaccgtgaagagaaactgtctcgcttttaacaattcaagctccatttccccgacacgctgctgaacggccggcacgtctttaatcggtccgttcaggctgttcggcgaatattcggatgcaaaccggacagcatagtcccttgccgcttgagcgatacccagataagcagcgggaatgtgaagcagccagccattcactttcgccgctctcggcccgctgataagctccacaagccgctcgtcattgaccgtgacatgatctaaaaggagatcatggcttccggtcgccttcatggcaatcatatcccatgtttcttcgaccgagacgcctgcctgatctttatgaatgagaaaaacaccggtcgtttgtttttcttcaatccatgccgtcacaagcatataatccaaagtcagcgaaagggttgtaaaggtttttcggccgttcagcacccattttccgtcttttttgacagcggaggtgccgggtcttcctcccctcgtcggactgccggtctgccgttccgtcgctgccctgttcaagacagctccctttttcacctcttctgtgataaatgaaaagacaccttcatcccagctgtttccttctccgagctcacccatgacggataaatgccagccgattccgagagcaacggccgcgtctccccgcgccagccgttcctgaaacagcaccatatcataaacggaaatgcctgcaccgccgaatgcctcaggtactgttaacgccgtatatcctgcgtcgcgcagtctttgaattttctccgcgggaaaacggcccgcctcatcatcaagcgcggctgttgtttgaaattcgtctgcaagcaggccgattttttccatccattccctctgccgttcattctgtatccataaagacactggaatccccccattataattccgataaagttaataagtattatagagattcaagtctcgtttcgcaactgtgaggctgtacaaaaaaaacgcgctattccatggaatagcgcgttcagactgcttccgggccgcggtcctgcttgagcccgagataaatcagcatatatgtgagataacccatcgtcatcacaagcccgccaaagaaaaagcttgaaaaaatcggctcttcaaacgcggtaaccgccgcaagcacgatccagcttgcatacaggtagatgatgaaataacggaatcccgtcttcaatttatataagagaaacagccccactgtagaaaacaatcccagcgcaagtctgaaataaacaagatgttcgaattggaacatgaatgacacaaaggaaaaaccaagcaataacacaatcggtaatgcggtaataaaatttctcaagtgagcacctccgtcattacctttattataaatcaaaatagcataaattattgatttatcgtgatctttttcacaaaaatgtcattcctttactttatacccgaacatcgcgtttgcaaaagctccaccaagcgacggctaagaagaatacgatatggataatgataatgcctgcggaaaataacggcgtcattcccgcaaacagcggtttcgccccgctcatatattgcgtcaggtcagtatttgcgaacagcagaaaacttccccatttgttttggaagagcgacataattgtcacgagtgattttgcgccgtacagcacgataaatgacaaaatgacggccgttgcgctgtttcggaatacagaagaacacaacaagccaaaacatgccatcgcaaacgcctcgacccagttcgtgccgattactttcagggtgttcataagaagcgtccctgattcagatgtcaccgacatgccgaagaaagccatgccgaacagcagagacagaatatagtacgccgcatacaggtacaagctgaccaaaaatacggtaatgagtttagatacaaaaatccgctcccgctttaccgggcggattaacagaaatttgatcgttttcttatcaaattcagcggaaatgatcgttgccgcgatcacgattgttaacgcctcaagcagaatattcagcccgggcgcgtacgccatatagccgatgaaattctcatccgttccggaactgatgacaagccgtttaatgacaagcgccataataaattggagaacggccatcagaatcagcgccactaatgagacttttcggttaaagagcttcatatgctcattcgctgtcaatttaaacattcgtctccccctcctcttgaagcgccgtcgtcactttcatgaattcatcctccagcgattccgcatacggcatgatggaatacacgagaaagtcttgtccgacgagcgcacggtttaatgccgggatgtccttcttcgctacggtgacggtaatgcccccgccgtttttctccggagcaaattgctgttgggacagccattcgaatgcttcgtcagccggctgaatgtcgaggacggctttttcttctttttcctcagcgccgcgcagaacaacctctgttttgatctcacctttttgaatgatgatgacacggtcgcaaaggtcctccacttcacgcaataaatgcgtcgcaaaaaggatgctcgtcccttcaagctccgcgagttcctttaagtgatcgcggaaatccttcattccgccgggatcaagcccgtttgtcggttcatctaaaatgagcagattcggacggtgaagaatggcctgcgcaatcccgagacgctgacgcataccaagggaatacgttttaactttgtcatgaacggcattggtgagcccgacccgctcgatgacttcctgaagcctgtcctctttgatgtttttgtgcatgttggcaaagtgcttcaggttttcccaccccgtcaggtacgggtagaattcaggattttccacgatcgctccgacggattcaagcgctttttcgaaatcagcatcgtgctgaaagccgttaattgtaatcgtgccactgtttttctttaaaagaccgacgatgattcggataagtgtggtttttcccgacccgttcggaccgagcaaaccgatgatctcgccctgcctgacatccatgctgatgttttttaaaatgtgctttttgcctattgttttgtcaaggccttcaatatgtaaaatcggctcagtcatacagccttcctcctttttcacaaaaaataaacagtgcccgtacataggcactgtctgcattataacattagtcatatattcgtgaagagccggagccgacgttatgtcttatccgggaccggtccgtttttttccttctcttcattattgacgacatccagaatatcaagcaggaacacaaaaatcggaattccgataatcaagccccagataccgaagaaatgttccgagaaaatcagaaccgtaaaggtaaaaaagatcggcagttccgttttcgctgacatcagtttcggattaaggaagtacgtctcaatcgcatggatgacgaaaatgaccagcacgatgtagatgacatacgctgcgccgcccgtcgtatacgcgatgatgctgagcggaatgagcgaaatcaccacacccgccacgggaatgagcccgaggaaaaagaccatgattgaaaggccgaacagctgcggaaaatgcagaatcgccaatgcgatcaaggtgaggatacagttcaccagcgcgataataaattgggcttcaagcactttgccgaatgttctcgcaaatttgctgccgaaataagcaagttcgtagtaaaaaacagacagcttgctgtgctgaaattttttcataaactccgtgagccgctttttctcgaacaggaaaaacatgctgagaatcagtgacatcacgacctgcaaaccgaaagtgctgatatcggccaagtatgtatacagtacattaaaaccttcttttacataggaaccgatattgatatcgccgaacacgctcgatatctcatcataaaacggaatgacatcgggatgatacgcgatgtgcttgatctgcttaatcagctgttcaatctgcttggcaacaatcgggtaaaagacaaagcctccgacagtcgccccgacagccagcgcaatatataaaacggtgatgaccaccctctggctgatccggaaaaaatggttcaacacgtgccggatgacagtctccagccgatccatcagaaaagtaaaaataaacgtaagcaaaatcaaattaatcatacttcggaatacaactaacaccccagttaaaacaagaaaaacggaaaaacgtctgacacccggatgctgaaaaaatttaaaaatagccgccatttatacactcctgctaggacaaaaagcccttagatttcatctttcactctctaattgtaaattatataacaaaatgacgctaaggtctttgtccacctcctaataaatttaaacaaatttatcttttttactcatggaggccgaaaaaaagaacggcatgcccggtgcatgccgttcctttccttttataccgccgctttcatttcttttacggcctgtgtgcttttcgtttcgtcaaactcattttcgctcttggctacgatgatggtggcgattccgtttccgatcaggttgacgatcgcccttccttcactcataaagcggtcgacgccgaggagcagcgccagtccctccagcgggataacctgaagcgccgataaagtggaggcgagtacgataaatccgcttccggttacgcccgccgcgccttttgatgtcagcatcagcacgagaatgatcgtaacctgctggccgatggtaaggtcaacgccgaacacctgcgccagaaaaaccgtcgccatggaaagataaatcgaggtgccgtccaggttaaaagaatatcccgtcggaatgacaaggccgacaaccgatttggaacagccgtaacgctccattttatccatcatccgcggaaggacggactcagaagagcttgtgccgagaacgatgagcagttcatctttaataaaacggagatagttccacaagctgaaaccgaatagtttgcaaatgatattcaaagcgacaaatacaaacaggaacatcgtaacgtatacagacagcatcagactcgccagcggcttgatggaatcaaggccgaagtgcccgatcgtataggccatggccccgaatgcgccgatcggcgccgcgcgcatgatgtagccgatgattttgaaaaaaacgtgcgacagtttatcaaagaaatcaataatgcttttgcctctttcaccgagcgccgccaggccgacaccgaataaaacagaaaagaataagacctgaagaatgtcgccttttgcgaaagcgtcaaccatatttgacggaacgatgtgagtgataaactcaatccagtcaattccctgtcccccgttttgggtgtactgagagacatcccctttttcaagcttgctgtaatcaaggccctcaccgggtttcatgatattgacgaccagaagtccgataataagggcgatggtggtcacgacttcaaaataaataaatgcttttcccccgactttgccgacttttttcatgtctcccatcttggcgatgccgagcacgatcgtcaggaatatgatcggtgcgataatcatttttaccgcattgataaatgtatcgccgagcggcttcatctgcttcccggcctcaggccatacgagtccgacaatgacgccgatgataaccgccgtgataacctgcaccgtaagatttttgaaaattttcatccctactcccccttgcctctcgctgcgtctatacaaaaatgatagcgttttcatacaaagaggggaagcttatgatcataacggacattttggtctttttggtctcggctagcggacgaatttgtagcggttaaccggccggcccactcccccgtattgaatgtcgagcttaatctggccgtctttctcaagaaaatcaagataacgccgcgccgtcacccttgcgatcccgagcgctttggcggcttcttcagctgaaagcggctccgtctgctgtttcatataggtcaaaatttcattcatcgtaaaatgatttaaccccttcggcagatccctggacggattttgcggaattttaagcagcatgtcaagctgctcttgcgacatggtgtcatgctcttcaattttccgtttatattgtttatagttttcgagcgcctgtctcatccgctccagcttaaacggcttcaaaatatagtcggccgcaccgttttgcagcataagctggattgtttctttgtcttttgcggccgagacgatgatgacgtccacttcgagcttttgttttctgatttcctggagcgttttaattccgtcttttttcggcatgtatacgtctaataccacgagcccgggccgcagatcttttataagcctgattccctcgtctccgtcagcggccgtggcgatgacgctgaaccccgaaacaccggtgataaattctttattcacctcctgcaccatcggatcatcttcaataagcagcaccttgatgtccatcgaatgattcctcccccttcatcggaaataaaatagaaaatgccgttccctgtccctgccgtgtgtcgacttcaatgacgcccatccctttgtcgacgatttgtttgacgaggtacaagccgtatcccgttcctcccgttttattgacggtaaaccctttgtcataaaggcgcgggatgtgctgatcggaaatcccgcttccgttgtcttctattaatatagcaagcacttcatcattttgctcgatactgatgtcaatatgtttgtcctccgtgtccgctgtttcgaatgcgccgaacgcattctcgattaaattgccgagcaggacgacgatgtcatgctggtcgacatgctccggaaatgccgagaacctgctgttttcatcaattttcacagaaatgccgagctcttttcctcttttgattttgcttaacaacagccccgccgcagcgtcattctgaatggcctgatgaagaaaatcggtgacgctttcttgttctgacgattccttaaaagcaagctggagcgctttttctgattttccgagctgaatcagtcccgcgatggtgtgaagcttgttcatatgttcatgattttgaactctgagcgcatcgacaaaatttttcacaccggtcagttcttccgccattttcgccgcttccgtcctgtcctgaaaaatggcgacggctccgatgaccttctttttcatgacgatcggaattctgctgctcatgatcacctttccgctgacttggatttcttcattatatacggctcggttccgctcgacgatctcagggaggcgggaatcttttaacacgtcccagatcagcctgccatcggtctcttgtctgacattgaatatctgcttcgctttttcattaaaaatggtgatgtgatgctggttatcgatcgcgatgacgccctcattcattgaatgaaacgtagcggtccgttcctcatacattctcacgatctcatggggctccagccaaaacatttgttttttgatgtggcgggccagcaaaaaggagccggccagtccgaacccgagcgccagcagaacgataaacagtatttcatgtttcagctgaagaagaatttcaccgaatccgggcagcgttttaccggccagaacgacgccgatctgattcaaatcccggtctttgatgggataaaaagcgcggacggcggtgccgatctctccctttgcttcggaaaaataaatgtgctcggcgaacgccgcggcttcgtcctcaccccttgaacgctttccgatcattgtgctgacgggatgcgaatagcggatatgatccatatccatgacgacgatgtagtccgcttcattgatgatccttatttcttcgaccgcatggcgcacgtcatccctttgttttttctgctcgagggcgcgtttgacatcggtcatctcagataccgtccgcgcggtattcatcagccgttttttcagctcgcgctcctctgtatgctgaatattgccgatcagcacgatgccgacgatcaaaaaggtaaaaagcacgacgatatacgaaagtatggtgattttccagcggatggtgagcttttttttcgtcattggcctcttcctttccgtctctttacgaaaacggcccgcccgattatgcttgttatagaaaatggcggagggggttttcgatgaaaagcttgctgacttgtctcagcctgatggtactcggtatcggaaccgctttattcatcggctttcatgatcatttctcaacggatgaaccgtattatgatgacgaacaggaaggcctgaaagatcaaatcgttttcaaattcagccatgtcgttgctgaaaacacgcctaaagggcgggcggcgaataagtttgccgaccttgtctatcaaaagtccggcggcaccattaaagtagaggtgtttccaaacgggagcctctattcagataatgaagaaataaacgccctccaaaacggggacgtgcaattcatcgctccctccacctcaaagctcggatcactgtctcccgaatggggtgttttggatctgccgtacgcgtttacaaactataaagccgtgcaagaaggcctcaacggcaaaatcggcacacgcctgttcacttcattagaaaagcatcatttgaaaggactggcgtactggacgaacgggtttaagcagcttacgtcaaataaaggaccgatcttcactccagacgatttgaaaggacaggcgctcaggatcatgccgagcagcgtgatcgaagaccaataccgtctgctcggcgcgcacccgcggcaggattcctttaattccacgtttcagctcttggaaagcaatcttgtagacggagaagaaaatacgatttcaaatatctattctaaaaaattttataatgttcaagattatttgacaatcagcaatcacgggtacctcggttatgccgtgatgaccgacgagcatttctggaattcgcagacagaaaaaacgagagccatcttaacggaggcgatgagagaaacgacggaatggaacgaagcctccgctgagaaaatgaataaagaccagcttgaagagataaagaagaattcatccattcatattcatgtgctgagcaaagcggaaaagaacacatggatgaaacgcctcgacccgatttacgaacaatatgaacaggtgatcggccgcgggcttgtgcaggatttgttatccttgcgccgcgagccttagcaggaccaatacgcccatctccgtttcatcccttttcccgccggggaagtaaatagggacagagcaaaaaaggagatggagacatgtttacacatacgaaaaaactgcagcatccggctaaaccggatcgtcctgacccgctgttcgcaaaaaagatgcaggaaattttagggggacaatacggggaaatatccgtcgccatgcaatatttgtttcaaggatggaatacacggggtaatgaaaaatataaggatcttctgatggataccgcgacggaagaaatcggccatgtcgaaatgatcgcgacgatgattgcgagactgttagaagacgccccgctggcagagcaggaaaaagcggctgatgatccggtcatcgggtccattttaggcgggatgaatccgcatcatgcaattgtctcaggactcggcgcaatgccggagagcagcacgggcgttccgtggagcgcaggctatatcgtcgcaagcggaaaccttctggcagacttccgcgccaatctgaacgccgaatcacaaggaaggcttcaagtcgcacgcctgtatgaaatgaccgatgataaaggcgtgaaagatatgctcagctttttattggcccgcgataccatgcatcaaaaccaatggcttgcggccattaaagaattagaagaacaggaaggtccgatcgttccttccacattcccgaaggctctggaaaaacagtcattctcccataagcttattcatttctcagatggagcagaaagcgctcaacaaaattggctgaaggaaacagcgccggacggagaaccatttgaatacgaaaaggaaccgaaagcgcacggcgaaatagctaagctggatcccgtcccgccgtatgtccacaacacgcttcccggacgcgagtaaagacaaagcccaaaacaaactgttttgggctttcattatgccttctgaaccgtccagtccggttcgtaccggatgtccgggtgatgtaacagctcatgaatgaaaggttcatcctcttcgtacagcatcacttctattgaaagaatcgcagccttctgctcgttttcttcgtatatgcggtcgtgttcgttctccataaaatcatcataggcctgtctgttctcccaaacgctgatgatctctgcgatgaacaggccgtctgcgtttttccgccagccgccggcctgtttgacgaagccatttacacatgataacgctccccaccttgactgtgcttgcgcaaatgcttcagcgtttgcagcgtctgtttcacatacaatctttttaatcagcatgaccgttcctctgtgatgactgttttcgcatgcgtatgctcaacacagagattcacggttctgacgtatgagcgggtgcggtgaatcgtgcctttcgggatgagcaggctgtcatttgctttgagcactgcggtttctttgtccttaaaatcgatcagcagctcaccttccagaacgatgaaccattcatctgagtcagggtgatggtgccagtcatattctcccgtaaacactgcgaggcgcacacagtggtcattgatctccgcgattgaaaaattgtcgtgtttttctttgactttattggcgatagcgagcaaattcagcatgtcagacacgagtgaaaaacccctttttcattttattgtatcgcaacggcggctcagatcaagattttcccaaaataaaaagcgatccagctgatgcgccggatcgcttttgatctgcaggttgtctgccttttatgcttttattagctgcttcgtctgtttccgcctttttggccgatttccttataaaaatctttgtcatgatttttgcttgttgcttctccgcctttttggccgatttcttgatagaaatccttgtcatggttattgcttgttgcttctccgcctttttcaccgatttcctgatagaattctttgtcgtgatttttgcttgttgcttctccgcctttttgaccaatttcctgatagaattctttgtcatggttattgcttgtcgcttctccgccttttttacctgcttcttctctgctcattttgttattatcttgtgccatttttgaattcctcctttaattggtgttggttgttggtttcccgatttcagaactgctaaacaaagaaaacacattgaatgtgttttcgggtggtttttatcattctgtatcgtgcatgcgttttagaatccggcgttttttataaagcatggtgcctgtttccgcgatgctttctaaagctgaacggttggcggacgcgccgaagatgatgcccgcgaccggaaccatttgcagcagttttttcgcggcgaacgtatcgcggtagctgtaaacgacttcccgccagccttggatttgcgaggcgacgcgctgataggcgcggtcgttttgatcatattgccgtaaatcttgcaggatcgctttttttccgatgacgtcactggatgcaagctggagcaatttgacaataaacacgcgttcttttttgtctttcggatcaaagccgtaagcaaccgcgatatcctgcagcgtctttaaggacaggccgagcatcgccggaatgtctgccgccagcgtgaatacgccgccgactcccgttgcggctccctgcaccgtcgcggcctttacgcttgtacgcgctatggcttctgcgatttcgtccatgacggcaagcggcgcattgcggatgtcgtgaagcgtttgacatgtaccgtgcggcagccgtttttgaaactttttcatgatgcgcttttctgatgtaaggtactgtccgcctgactgaataaacgttcccgtttcatcgagaatgagtccgattttcctctgaataaattgcggtgtcagcttgtccaaaagctgaaacggcaagcgggtgaatgtttgccagaacatcaccctctgctgcgccttttcccatttttgaatgtctctcagttgtctttccaggtctgtccgctcttctgtcacccgtcctgcacgtcctttctgatttctttgttcatagtatacctttatggcgttttctttttacacccggccggattttttatccggaaaacattccattgtttaattttcttcaaattctctatattgtataattttgaataatacgattgaaggagaatgttgaatgcaatggatttatttaagtttagcgatcatttttgaagtattgggtacggtcagcatgaaattatcaaatggatttacaaaacttgtcccaagtattttattgttattgttttatatcggcagcctttgttttcttactttgactttaaaatatataagtgtctccatcgcgtatgcggtctggtcgggaatggggatcgtgctgatttccgcgatcggaatttttttctttcatgaacagttctctgtcataaaagctgtctctgttcttctgatcatcatcggtgttgtttccttaaactttatttctgaaagtgaaacatcatcaaacggcatcagcgttcatacggacagaaacagatgatgaaagggttaaaggttctcttcctcattacagatattggatttatcgtttattggattgttactttttttgagtggattccaaaaaacatggtgtttaaagattatgataacgccatgataatggcctggaactggtcattctttcccttagatattttcatttcgataaccgggctgtacagcttgtttctttataaacggaaacatgcgttatggcgctctttcgcattaatatcacttgtgctgaccttttgttcaggcctgcaagcgattgccttttgggtatttatcggtgattttgatcttatgtggtgggcattcaatctgtacttgcttctttatcctttatattttattcagaaattgctggtctctcgtaaaaatagctgtcattctttttgatgaggcggttttctttttctccaggcgggaaacacttttcataaaggagtgatagacatgccttggtctatgaaggattatccgcaatcattgaagaatctcgaggaacctgtgaagaaaaaagcgattgaaatcgcgaatgcgatgatggatgagggttatgaagaaggacgggccattcccattgcgacaagtcaggcgaaagagtggaaaaaaaacgcttctaaggaagaaatcgatcagctgatgaaacacgatgatgaaacgaaacgcggaaattgaatcggaataaaggaaaaaccccgctctcaagagaacgaggtttttctgcttataaaccgtaataataagatagtgtggtgacggacacgtagcctgtcgctcctgcatacgtgactttcagccatttattagaattggtgtagtggccttgaacatattctccggttacccaagaacctgtaatttttttaccgcttgagaatgttgtgatcgttgaacagctgaccttagagcatgagcgcatattagcaccgtaaataccgactgtacccccgctggctaaaatggaaacgtccggttcagctttaggtttgaaagctgctgctgatgcagagccgccaaaagcgaataaagaaacagcaaaaatcatggcgaaagaaatgatcgacaaacgacgtaccaagaaaattccccctcttttatcatatggctggaaagctttcctgacgttattatacttttttgcccgggagactgaaataagtctaatgctccaacttcttttcttcgcaagtgaccatgccgattctttatttgataaataacagcggtttattggactggaatcactgatatatcgttgattcaaacgtttattcagagcggccggagtttttccggaggtcatttgaatggtacagaaaggttttatcttccaatggaaagaaacattattattctatttacccgggaaaacggaggaaataaagcgtctttttctcaggatcagttgggcgcacagaaagttgtgaagttatacaggcaagtgtcctcttttcacctttttaaaagaacgctcaacgcatccgcgcatgatcggacgcggaaacacgctttgcgaacggcatcgcttctttcccggaacgatgccgttttcattttcggacctttcttcggcgggatacataccatagataaaacagggcatcaatgtaccggtttattgaacataaagaacttgacatctcataatagcggatttatgatgtagataaaataatttgcatctaggaaactttttgttatttagctaaaaatctatcggaatttaggtgagacataatgagcaaagacatctcagcacaatcactgcaagcaaaagccgtgcaggatgcacttgacggcaaaagcaagggattcaagcggcttctgcctttcttaggcccagcctttatcgcggcgattgcctacattgatccgggaaacttcgctacgaatatctcagctggttcgaaatttgggtatatgctgctgtgggtcattctcttttcaaacttgatggcttttttaatccaagttctttccgcgaagctcggcattgccacgggtaaaaaccttccggaaatcgccagagaccggtatccgaaatgggtatcagccgggctgtggatacagggtgaactggtgattatggcaactgatctggcagaatttatcggggcggcgctcgggctcaacctgctgttcggcataccgatggttgaagcggccattatcgcggcgatcggatcattcgcgattttagagctgcagcgccggggttaccgggcgctggaagcgggcatcgccggacttctgtttgtcgtggtgatcgccttcgctctgcaaaccttctttgccaaacctgacgccgcttccgttctcgaagggctgtttatcccgaaaattgacggaatggacagtgtgctcttggcaaccgggatactcggcgcaaccgtgatgccgcatgccatttacttacattccgcactgacacagcgccgtgtcgtcggaaaaacggatagtgagcggaaaaagatttttagattcgagacgattgacattctcatcgcgatggtgatcgccggggcgattaacgcaagcatgctcatcgtcgctgccgcgcttttcttcaagaacgggctgtatgtagaagatttagacgtggcttatcagcaattcggccactatatcggaccggcttcagccattctcttcgggatcgggctgctggccgcagggctttcaagctcttctgtcggcacattgtcaggtgatattatcatgcagggcttcatccgttaccgtatcccgctttatttgcggcgtttcattaccatcattccgccgatgatcatcattatctcgggggtcaacgccacagaagcgctcgtatggagccaggtcgttctttcattcggcatctcctttgctctcgtaccgctgattatgtttacaagcaacaaacgcctgatgggcgccctgacgaaccgaaaatgggtgacggctctcgcctggctgattgcggttttagtgatcgcgcttaatctgtttgtgatctacgattcattccgttagaaaaaaccggccatagcggccggtttttcttttggcgccgggtgccgttcgtatctttttccgggcgtttttggtatgatagaagaaaaatcggagttttgcttatgtcagtatttatccttttttatctgtggattgtgccgattgtcatcggcatcttctgttctcttattgcttatcggacaacgggtaagaaacgtctgattcccggctttttcatgatcgcattaagcatcatttccttaatcacggggctttggatcggcggggtgaactatcatgtgttcatcgggggcatgtttttattcggtacgttattggccggctccgccttcccgtttttcttcgctctttcacgcaaacgaaaataaacaggcatgccgcctgtttatttttattcgttaaccctacgctccgataatgtgattccgcctcaatcagcctgtacatgtgttatataggctccagcccatgtcccatcgtcgaaactgcagccaaaatgaatcctgctaaagaagattttgaattataagaaaaatactgtattaaaatcctatttaccccaaaaatacctattgatagaatggtatctgagagggaaaaatgttcaaagcggatcatatcggtcccgcctaaatacataatctttcatttctctctacactacatttctaaaggagggtttcccattaaacacgcagctaaaggcattctgtttgccgcatctttagcccttgtaactactgcttttgtccccgcatccttagctaaagaaaatcataataatactgccaatgccactggaacgaccaaatcatttttttatcagactgatacgcaattttcctacggacttaaagcacaaagcgatgcatctgtgtcaaaaccagtcaaagatgtaatcagagaagtgctgaaaaataaaacaaaattattcaatcttgttgaaaaattagcaggaaagaaaataagaaatgaactcgaatccgttttcaatgaacacatagaaccggttttaaagaaaatgctgaacgagtatgtcgccttaagctgggctgacgtggaaaagaatctttatctttcacttaaaaagtccggactttctgacagccaggctaaaaacctcgctcaattgacaactttagcaatgaaagcattttaaaatcattcataaatgatcgtcaggaaaatacgtatgaagtaatgcaaagtgctgttagattcactctaatagcactttttcattggagatgtcacatgactgtcttttttactgttctgctcactttcttatgctgccttgtgatttcatctcttatttttatgattctattaaaaaaagagatcgtggatacaccgccaaaccgcttagctcatgcagcattcatagggcttattggattctccctgttcttcgctataactgtacctagcctagttatttattttgcagctataactgtaaatcattttttcggagagtatatcatctatggttcactttcagacttatacatattttctgtcgtcgtcagtattttagctttaatttatatgctaatccttatggcaattgtaaaaggaattactcatatttttaaattacctacttggttagcctatatccttgaattcatttttgcatgggctgctgtttacttctcaattaaatatgtttccaataatatcattgaaaacatatctatatttcaaggtggagaaattcttctttcattcttcataactttcttattttcgggcctggatatactttttactaatttggataagatctcaaaagagaaattaggctaataaaaagaaaagcaggcaatttagagcctgcttttttatttccattttaacatttctccaagccttgctttcgttttcggcccgtaaatgccgtcagcagtcaatccatacatggactggaaccgtttgactgcatttgctgttttcgacccgtatgcaccatctattccgttattcttcgcccctttgtccggatagtaatagagagccgccagtgctgtttgaatctgttttacggccgccccctttgttaaggggcttgtcactttaaaaacgcctgatggcagcgtgtaagatgattctttaccttttgttggggtactggccgaatccgtcagctttaatacttggccgactttgataaaattcagattcttgataccgttcaacctttgcagggtggccatgctcacaccatttttctgtgcaatgacagaaagagcatcgcctttcttgacggtgtacgtcgccccacctgtcttggtttctgtttttgctgataagggctgggcgatctaatgtgcgaactacgtttgttatgaactgtcccggtccctcttaagtttttttatcagccatcgctcgccagctgtggtttttcacaatctccgtttccgtttagggcggctatatgcaagccaagtcgctcaacaaacaaaaaaaataaacaggcatgcagcctgtttatttttttgtaagcgccggcttttttaaaacagccgttttaagcttttcttgagcgacggcatttcgattttttggttttcaaagaaatttttcagcatgtatttgctgaagcccttcgcttggccgtaagtgatttttcccggaagcggcggctcgtcgccgatgacggcgtcgatgacgaccggctcatttgagttgagcgcttcatgaaaagcgggagccaattcctcgtgtttcgtcactttgatgccttttgctccgcagctttctgcaaaagcggcgtaatccatattttgcagctgggtgacgtagtcaatgttgcctttgacccgctgttcatattcaatcatgcctagattttcgttgtttaaaacgacaaccgtaatcggcagtttgtatttaacagccgtcggcaggtcctgcatcaccattgaaaatccgccgtctccgcaaatggcgatggactgccgctcaggttcggcaaggcttgcggcaatcgctcccggaagcccgcatcccatcgtggcgagccagcttgatacgataaagtcctgcttcttcattttaaaatggcgggccatccacaccgtaaccgttccgacatccaccgacagaacggcatcgtctgcggccgcatcctgaagccgggcgatgacctgctgcggcttgagcggatgagtcgcttcagtttcatccttttcgatttccttccaccaatgcttcatgtgctcggtgcaggcgtccaaaaatcttctgtcttctttatattcaatgtattccgtcagctctttcagccccagagccgcatcactgacgattcccgcattgacgggatagcgcttgccgattttcgccggatccgaatcaagctgaatggcgggcgtatcatccgggagataatccctgtacgggaacgatgtgccgagcataatcagcagatcgcattcctccatggcttcgtaggcgggctttgtgccgatttgtccgagattcccgagaaagtggggatggctgtcaggcacgacgccttttgccggaagggtaatgacaatcggagcggccgctttatcggcgaatgcgagcagctcctcttttgccgattttaacccttggccggcgagaatgaccggtttttttgcgttgttaatatattgcgcgcatgtcacgagatgttcttttttcggctctatatcggctttgaggtatatcggcgatgtataaaccggctcccgtttgattttttgcgcgaataaatcatcagaaacggttaaaacggcaacgccttttttgctgtaagccgtacggatcgcctgattcagaagatcgggcagcgcttctgccgtatgtacttgctggttgaacaccgccacgtcctcaaacatttgctctaatttgatttcctgaaagctgtcacggccgatttcatcggaagccacctgtcccgcaatcgccagcaccggaacgccgtccgctttggcgtcgtataaaccgttcagcagatgaacggcccccggtcctgcgattgaaaggcagacaccgatctgcccggtcagttttgcctcagccgcggcggccagggctgcgacttcttcgtgccgggtttggatgaatgtcaggttatttcgttcatgtctcagttcttcgataaattcattaatgctgtctccgggaatgccgtatatatgaccgactccccattgttcaagcagctccgtcattacgtgtcctgctgttttacttggcatactgcatcctccttttacctgtattcatcccctttttcatacgggttgaaacacgggctatactctcagcttttttctcagccgatcaaggatggataacagattccggtctttaaggactgccttatgatttgccgccccattgagtccgtcttttatttgccgttttctgttcggcaccatgaacagcggcagccggtttggggaaaaccagcgtaatgcggcggtttccggcccgttcatcagcggagttcccccattaatggctccgatgaaaacgtgctgtgtatcttcaaatgccggcctttcatactcaccggctttttttatgatggtcacgttataaccggtttcttcgaaggcctctctgacggctgcggcttcaggtgtttcaccttctgcgatcccgccgccgggcaaatcccataagggaatgtcttttcgttttacgagcaatatgtcccgcccgtcattttgtatgatgacaaaagcgccttgtgccatgtcgtcctcctttacaaaaaagaccgcggcatttcagcctgcggtctttgccgttactttttaaaatgatacggcagggtggcgacgatgatgtccttcttccaaaacagccggacgcggagcaagaaggctgattggttgtgaaggatggtctgccagcgtttcttcgtaataaattgcggaaacagcaccatcacggagaactgttcttttttcgctttctgttcgaccgtttccaaaaatttatcaaacggatgaaccagactgcggtatgaggaatgcagggtgacgaggcggacgccgttatgaagttcttcccagcgcttttccacctttttttcgtgttctctgtcaaaggaaacatgaaccgcaataacctgatccgataatgatttcgcatactgaatcgatttttggacgacggtggtgacaccggcgacagggacgatgacgacggttcccctgatttcctcaggctgctgatcaacgacccgcagctgttcgccgaccgcggtgtagtgatttttaatgacgaaaaacagcatgacgacagcaggcatgaataacagcaccggccagacaagattgaacttcgtcgcgaataaaatacacagcaccataaatgaaatggcggcgccgcatgagttgatcagcatttttaccgcccagcccttcggcttctgcctgatccacttgatgcacattcccgtctgcgacagcgtaaacggaatgaacacgccgacggcataaagcggaattaaatgttccgtgcggcccccgaataaaagaatgagcaagatggacgcgataccgagaaagataattccgtttgaaaatcctaatcggtcgccccgtaccgtaaacattctcggcatatactgatcgcgcgctaaattaaacgccagctgcggaaaagcggaaaagcccgtattcgccgcaagcacgagaatcaatgatgtaacgccttgaatgaaataatacaccgtatggcggccgaaagtttccgcggcgatttgtgaaataacggtctcgttaggcttcggtcccgtgccgtagccgtacgccagcaccgtaatccccgtaaataagatcgccagcagaatccccatcatggccagagtgcgggccgcgtttttcgccggaggatttttaaaggccgggatcgcgtttgaaatggcttcaacaccggtcagtgccgaacagccggatgaaaaggccttcagcagcaaaaacagcgtaatgcccgccacgggtgtgccgatcggcgtgtgttcggccggatgaacctggcccgtcataagcttaaacagtccgacaacgatcaaaaggacaagcgccgccacaaacagatagacgggatacgccaaaatggacgccgactctgacagtcctctcaaatttaaaatcataatcagaatcacaagcaaaacagcaatgagcaaatgatgcgggtgcaaagccggaaatgccgatgtaatggcgtcagttccggcagaaatacttaccgccaccgtcagaatataatcaacaagcaatgagccgcccgcaatcaggcccggcttctcaccaaggttttcttttgaaaccatataagcgcctccgccttgcggataagcgtaaataatctgtctgtaggacagaatcaaagcaagcagcaaaatgagaacgccggctgcgatcggaatggaataccaaaacgcggccgcgcttaccgcagccaaaatgatcagaatctgttccgttccgtaagcaactgatgacagcgcgtctgaagaaagcatggcgagcgccttgagtttcgtgagtttctgctctccggccgcctgtgatttcagcggtttcccaatcaaaaatcttttgattgaatggtacatttgttgtcttcccctttttttcattttccgtttgatttacaaactcttactgctatgatgtctccgaatgctgattgcatgccttatttcagcacagcaaaaagacacagaggcaaacggatgcccctgcgccataatcgtgcacaggtttcattcatctcctctcatgaacgcttacgaggttagctgtcggattcgggcttatgagagttggccctacctgaaaaaggattcaccccaagcggcatgacgcgccgcaaattggttcccccgctctgattacagattaagcgatatagattataaaagagatcatactcccgtcccgttcagttgtaaaggggcttttatgctgtttcaaaaataaaaaaatcaccgccaaaaatggaaataaaaatacaaaaaaaagaggcctgttaacggcctctttttccttcattactcttcgcttttttcatgatccgtttttctttttttccttcttgccgtcagccagatcagaccggacgcaatgatcataagcgccgcgaaaacagcgatatacgtgacgttcagtgctgcggaacggcttttcgtatcagccgatggactgctgttatctgacttgatttgctgatggttcgaaaacagctgcttgcctgtcgtttcgttgacgacggttgccgcatcgcttgtgctgtctaaaaagctgatcagctcttttgtgacagccgcgccgcttcctgataacggagcaaaaacagcaatactgctgtctgagtcccaaggtgatttctgtgtaaacgcgacttgtttcgttgtctcattcagcatctgaaacgaagaaacatcgtaagctccgctgcggtctgatggcacgagaagcttagaggcgtttgatttcaaaagcggaatttgcggcaggcctccgataaacacaacattccggcctttggcatccgcttccttcatgtctgatgccgtctttacggtaaagccgtttccgaatgaatccgccaccagagaaagttctttcagtgtctgcatgtttacgtcatccgggatgacgatcactgttttctctttcccgccgcccgcaaacgggagcggccattgcccgaaatccgctttctgtgccgcatcgcttaccggatacgtcagcgtgctgcttttatcaatatagacccatttgttttcgtcacggtcgatacacggattgttatgtttcaaacctgatgtgacaaattgcagatcaatgtacctgctgcttcgcaaaagcttcggatcaatcgggattgagacgtggtaaaagccgtctttatcttgattgccgagatcatcaagacgcaccgcattcggctgtccgttgaccatgacgttcagttccgctctctcagcgtcatcatctgaatccgccgtcttccagactgattccgacgtctttaatgtaagtgaaagcttgaccttaccgtctttatcaacagcggccgccgcagggtaaaagaagtgctctgacgccgttttgtttgatccgaccgttacatttcccgcgccgaagtcctctagtgtcagtttattgcctgtcttttccgcagcgggctgaaggcggccgattgtcaaagtatctccgcccagctggcttgaataagcgctgtctgttatgacgcggattttatccgccagcgttttgtctgattgcgccgtgacaaagaggacgggctgccgtttgtcccctgatgtcagaacccgttcagcgagaagaagtttgttgtcttccgctttgatgttccctcgttcgaaaagctcttttattttcccgttccaatgctgatcagcgccgatgacaattgacggattgctgattttgccggcgtcggattcttttacataggataccttcagcctgctgtctgccgttttcagatatgcttctgttttgactgcggcttcagcttccgccgaggtcggtttgtcaggaaggataatatcggtttcttcacccgtattgcctgattgggcaaacggatacgggaaatggccgagatccgctccctttgacttgcttgcttctgaaagcacaaggcggctgtccggataaatttttatccagttgcctgacgtatcctgcctgacgcagacgccctcttttaacacgccgtaaaatcgtaatgatacattgtgatagccttgggcggattggcttttgctgagattgagcttcaccgttttccgcttggaactgccgtcaagctttatggatttgacgggttcatcatcaatggcgatggttaaagaagacggggcaattaataagtttgacgcctcgtaatcaatcagaagcgactgatcggtattcgaagctcccgcaggaatctgataggtcagctctgcgctgtctttcgccccgtacagtgtcatcagatcgccagtcagcgcctgctgctcttttgcgccggcgcttgttccgagggcggaaccgtccgttttcagttcccgggccgcggccgcctgcccgttatacatcaatagcaaaaggccagttatcaatatgatcgcttttttcaaaaaggtcacccgcttttattttgattgtatcgctccgttttgtaccacttgacttcctgcttgaacaagcggtgcttaatctctgtgaataatgaccagatgacgagcacgatccaagcctgggagtatgtaaagtacatcagaaatacgataaagaagttttgtttgttcatttctgttttttcaatgcttaaagtaatcatgacctcagtcataaacaggaaaaaggccagtatccacaaaatcatcgccaaaaacccgactgccagatgcaggtcgtaaaaaagattgatgataaaaatcgtgtttgacatgatcacaccgaagaaaaacaaaaaatacgtaaaaaagaaataaaacagatcgaagatgatccgcttgcgtttcagcttaaaaaatcgggataaaaacttgagaacgacgtattggttgccgcgcgcccatcttgtccgctgacgccaccagaccttccatgtctcaggctcctgctcccatgtcacagccgccgggaaaaagcggatgtgatagccgagattatacacgcggatggtcagctcggtatcctccgccagcgccttatcatcccagccgccgagctgttcgataatgctccgcctgatcgcgaagttcgtccctgggatggtggcaattttgaaccatttccatctgccgccctgcgccatccactgaaagcagatggtttcaatattgataaacttcgtcaggatcgttttggccgcattgatgacacggaatttcccgacaaccgctcccgctttctcatcattcatcagaccgagaaccaggtagtacactgccattttttccggcgtattgtctgcatcatacacgcagatcacgtctccgttcgattccgcgaaccctgagttcagcgccgaagattttccttttccggcgttcgggggctttgtgatgaccattttaataaagtcatactgacgggaaaattcattgacgatgtctcccgtccggtcggaggaattatcgttaacgacgatgatctcaagcctgtctttcggataatacaggttcaccatcgccttcagcgtctgcctgatgacgacctcctcattatgcgcgggaatgagcacgctgaccttcgggagctcccgcatctttgcgcgccatttcggaatgttccgttcgaaggtcatataatgcctgaatccgccctgcatcagaaacatgtgatagagaagcatcacccatattaaacttaatgagataaaaaacagaatgttactcaaggcttcttctctccttaaagattcgtttttttaatgtggcgcgcaaataaagaacgtagcaggcgaacatgatgataaacaacaacaccacgccggagagaatccaaagcgctttttccagaggcgtctgctgatggtgattgaaaaaggccgttatcggatgaatcttgttttccacatgaatggttccgtctccatccgttttgatcctgacgctgtccgacgttaccgtttgcttcgttttcttcagatcgagccactcgccgccgggaatccgctccatctgattgacgagctcggggaggtatttcatgccgagatacggatggtagaaaccgcccgccgttccgccgccgaaatcaatcatctgcgaaatatgattctccatatctccgagcggattttcctttgagctatcggcataaccgattgtttctgggtacagcgtcatcccgtgcagcatagccggctttgagacgaacggaggggcgcccgaggttttccacgtcgtgccgctgagctgcacttgtccgaaaatgctggagaaataagaagatgcgattttgtagccttcttcagacatcgtatagtgcggcgcttcgaatgacagcgggtaaaggccgagttctgtcagatcgtcaatcgcctgctccagcttcgttctcgtgtagatgttttctttttcacggaaaggcttcacatacgcccggtacgctttttcattcggaaaatcctgttccttttcaagcttgaccggagtatcatccgcattttctgacgtaatcggctgatccgctttggcatcccaaaattcaaagccttctcccgtttcgctgtatcggtatgcgtgcgtgtagccgtgaataatgatgctgccgcccatttgctgaagttttttcaggactctgaccattttcggcttgtccgccaggtatactttttctccgttttccggattgagatagaccggaatgactgccagaataaacggaatgtgtcttttatgcaggtaagcgcccgcttcgtaaagcaatgtttcatctgacatcggactgatgtcctcaagccgtaaataaaggagggtgccgccttctgattctccgaatgcgttgcgcagcgctttcgccgtcagaaacgagtcatttaacaggctcgtcacaccgaaataatagtcagagcgcgccgttttccacataaaagggcgggtgctgccgtcaccggaccggtatgtataaaagggctccccttttactcccgatacgccgagcacggacatccctttttcaagcggcatgtctgttttttcttctttgctgtaaatgcggtataccgtttctttttctgccagggacaaacccgcaaattggcggaactgtccggcgttatagccgatgctgatcagcttttgcggcatactgctgatcagagacacaaatgatgcgctgagcttttttttcgtgacgccgtagtagatgacgcgccgattctttttgagatcggctgctgtgatgtctccgtcgcttttcacggtgacggcggatgagaaatggcccgcggtcagatcaagcattttgacctcagcggtttctttgccgtccgtgcttgtataaataatgagaataccgtcctttttgtcttttgcttccgccgtgaggggaacataaaccgccgaaatcatgaagagcgccgagagtaagagacgtatccatttagagttcattcatcatcatctcgttttccagttcatttaaaaattgctcggccgtttgtaaatcctttcggtacgccaagtaacatacacggaaggtgatggagacgtatttaccgttttgcagccggtacgtatccaattcctttttcagcttcgccagaacggccggcatgttttcttcaggcgtatgggtcagcacgatgccgaaccgttcggcggacggcctgaattttttgtctgtttcccgaacgcttgaccgaatttggcggctgataaacgccagcagacgatcggtctctttttctccgtagagggatttgaattctttgaaataatgcatgtgcagcagcaaaaagacgaaggaattgccgtagcgttccgcccgcttgatttcctcagacagttccagcttcatccgcagatggttgtcaaagccggtcaccctgtcgacggcgacaaagctcgtaatctcttcacgcagctgtttcactgagcgctcaagccccttcgccaactcgtgaatccttcctgctatgtaagaaaagagcagcagcccaatcccccaaatgaccagcacctgcagactttcggcaccggcagacgccataaagctcccggtctgaaaccacaggagcaggctgccgagaacaaataagacgagtaaggtgatgacgagcgcgtagattgccccgaaccatatgccggctcccgtgacaagcaatgtgatgcaggttatcagaagccctgcggattgctgagacgcatagtaaataaaaaaagacagcagcaccagcataactgctgtgtagctgcacagtttttgtgattcattgaatgatattttcattaaacaatttcctttcagccaaaagcggcagcaggttatcgaaagaatgtgtatcgtccccgctcatatagccgccgtaatcaggtttcagcgtgtccagtgtttcaaatgaagtcattctttcataaagcggcttgatgacagccggatcagctttttgttctgctaaaaaaagaacggccagggcgtaaacggatggtgactcgtattgaaccgccggctccttcgtgtctgcgctgtatcgtccgtacagctgtccgcgcgacttaaattcctctatcatccatttcgacagcgcggcggctttgccatcgtcccgcttcagattcacggcggcgtacagctggtcgatgacattcacttccctgtcatatttgtattcctttgtttcagtattgaacgatttcggcagaaaaccatttttcaggggcgcaagattgagaacatcaaggttccggttttccgttttctcatcgataatccccttttctctgagcatctgtaaggcgccggggtcgacataggacaacgtcacggtctttgacgcggcatttgaatcggcatcataataatccgtaaaatacccgtcattcgtattgtatttttccagcgccttcccgatctgcaccgctgttttcccgtattcactgtttccccacaggattccggcctcattcagacagttcatgattctgaaatcgtcaattaaggcattggtgccgctcgctttattcccgtcaatcttccacgacacgagcccgtttttcgtcagaaacgaatcggtgagaagctgatattgcgcttgaaactgccgttcatctttcctgttcagcaaaaatgccatccatagtccgagagactcagataaatattccggctcaccggatatgttcgtccggatcatcccccgcccgttcatcaatttatgataaataaaatgctctgcgggctgaagcggtccggacggttcggccgccgcctgtttttcagtgccggcctccgcgcaccccgctgtcagaacgatcgaaatcaaaaggatcatcagacgaaaaacgaattgcttcacagtccatcctcctattttataaacccttttttagacccatatcttattttttcacaaagtatttttactatataggaaacgataaaagaatactagcattttttcacattggaaaattttaaatgggagcgccgcctgctcacctttcccctcttcgtctggatcgtattcccattacagttaaaaacacaacaaaaggcagcatttcgttacaaatgctgcctttctctgctctatttatccaggccgagttttttcagctgttctgccagcgcgttgttcatcggctcctctttgttttggcttttcatataagagttgatgtcccgcttggatgcgcgtccggatttatctttcgccttgcgcttttcaaagacggacagtttctcccggtggccgcatacacatgcgaaggtttggccttccccctggccgcgaagctccattttcttatgacagttcggacagcgggcgtttgtttttcttgccaccgttttccggctgccgcattcccgatcctgacacacgagcatcgtgccgcgtttgccgttgactttaagcatcattttgccgcaatcagggcaggcggtgcctgaaatgttgtcatgtctgaaggtttggctgctgtttttgatttccttcaccgttttgcccgcatatgttttcatgtctttaatgaacacggcggatttcagtttgcccgctgcgatggcggagagcttttgctcccactcagcggttaaggccggcgattttaaatcttccgggacgagctgtaagagctgcttcccttttgacgtgatgaaaatatctttttcttttttctcgattaagaaactgttgaacagtttttcaatgatatcagcgcgggtggcgactgttccgagtccgccggtttcacccaatgttttcacaaggttcttctcttctccctgcataaaggcgcttgggttctccattgcggataacagcgtgccttcattaaagcgcgccggcggtttcgtctgtccgctcgtttctttcaatgatgagacagtgaggcgctgaccctgctgaagatccgggagcgtctggtctttgtcttcctcgtgatcgtcgtcatcctcgtacatatcatacacggctttccagccaggcgattgaaccgttttcccttttgcggtaaatgtttcgccgccgatatcggctgtgacctttgtttcttcgtattcgaacgccggcattaacacggcgagaaaacgtttggcgatcagatcgtaaagctttcgttctttgtcgctgaggcttgaaaggatcagcggctcctctgtcggaataatggcatggtgatccgatactttcgcatcattgacgaatcctttatgcgctttgacgccccgcttcagtatttgattgacgtattgcgcgtacggcttaacttccatgccgtttaaacggtcttttaaagtcggcacgatgtctgcggaaaggaatctggaatctgtccgcgggtaagtgacaagcttatgctgttcatacagcttttgaagcacggacagcgtctcttttgcggagaaaccgaagcgcttatgagcgtcccgctgcaattccgtcaagtcgtaaagaccgggtgcgaagcttttcttcgccgtttttttcaattctgaaatgactgccggctttccttgcaggtcttttgccaaacggccggtcaccgtctgatcgaatgttctagtctgctttgtttttttatcctgccaagtcagcgtcatctgatcagccgccgcgcggagaccgtaataaggaacgggtttgaacgcctgaatgtccgcttcacgcttggcgatcatcgccagtgtcggagtctggacgcgtccgcatgacagctgcgcgttaaattttgtcgtcagcgcgcgggtcgcgttgatgccgacgatccaatccgcttccgctctggcaacggcggaatgatacagattttcgtactctttgccgttgcggagcttttgaaatccttctttaatcgccttatccgtcacagaggaaatccacagccgcttaatcggtttgcggacgtttgctttttcgataatccagcgggccacaagctccccttcccgtcctgcgtctgtagcgattacgatctggctgacgtcttttcggacaagctgagctttgaccgcattgaactgttttcctgtttttttaatgacgacgagctttaaaggctccggaataatcggcagatcctcaagccgccatgattgaaattctttgccgtatccttcagggtcagcgagcgttaccagatgtccgagcgcccatgtgacgatgtagcggtcgccttcaagatatccgtttccttttttatgacacttcagcacgcgggccaagtcccggccgactgaaggtttttcagctaatacaactgtttttgacatgcttttcacttctctttctttcacaatcatcctgttattataacagacttcctcacgctctctctaatcgaggacgttttttgtgtcaatttctgagaaaatgacgtgggtcacggtttgggcatacggagaggtgcggttaatgaagtgttcgatcgtttccaggctgtccgcgttaatcttcagcatataacacgccgccccggcgacccgaaaacaaaattcaatgttgggaatagattgaatgtaggttttgaattgatcgtattttccgtttttcaccgtcgcttcgacaatgcaggagacgggaagcccgatctttttttgatcaatgtccaatgtatagcgcttaataacgccgaaagattcaagctgtctgacacgctctgtaacggacggggctgacaatttgatttttctgccaagttcccgcatggacaggcggctgtcccgctgcagctctttgatgatgctcagatcaacattatctagtttcatgactgtagtccttccttacccttttggctatattatcaagagaaatccgaaaaatgacaagaacaacaggctgaattaataaaggttttttaggaactgacgcgaaatggtcatattaggactgccctttgcttatagtatagaggaaaaaagatgtccgacaggagggagctgtatgttacacacgccgatcggcagacttcgcacgatggggtttattgaaggaatgtcgcttttggtgctgctgtttatcgcgatgccgctgaagtattgggctcatcatccgctcgccgtcaccattgccggttccattcacggcggtttgtttatcatttatctggcggtgctggcgtatgcggcgtttactgtcaaatggcatgtgaaatggtcagccgccggttttatcgcggcctttattccgttcggtaattttatttatgaccgcggcctgagaaattatcaataaaaaagctcctctgcagaagaggagcttttttcatgcgttacatccatttcgtcacccaggcgatataataagcgccggggatgaatacgagctgggcgagaagcgtccccgccacccttgatgtcaccatcgtcaatgatgtccattttaaggagacgtagctgcgcttacccttcgccacatcgtctgccagtacggagactttcgggtcaacaaatacagccaacagcatggtcgcaactccgttgattaagcctgatgccatcacggcggtcgtgctgtgctcaggcgccagaaggccggcgtacagagcggacagaacaccgatcgtgtaaatagacgtaatgaccatattaatgacaaacaagcgtttcgggatcattcggaattgaagcccctttaaataggagactgacggcagtctgatataagaacgcgcatgcttcagcccgttcagtgaaaatccttttttaaatacctgcatgacggagcctcctccgtccgccaagtgtataatcgccctggtgaataacgcgacgaatgtcggcaaaagacagatgccgagtatcgttccgaccgtggagccaaatattaaaaatcgaaactgagcgcccacaacagacagggcgtttgatccggcggcatcaatcagatgtccggtaaacggctgctgaaccatgtttgacatacgcgacacgatgaccatgacattaaataatgacagcgctgacgcgataaatccgactctcgcgccggaaagccgtgttgcataggcaagcgtttcaaccgaatgtatcagcagcagaaaacagaagataaacagtacttgtgaagtaataacgtgcaatgtatgattcctccaaatcttttctactgattagactctgcagactgcggcgaggtttcgtccggttacataaaaaaaccgcccggatgtccggtgcggttttgtcttattcttttcttacgcaaataaataatatatgttgcccgccttagcccgcgggtgattcgtataaacagttccgacagaatcattcttcgaaagtaaacaccatggaagttcttgaacacaagacaacgaaagccctacctctcaatcgtcactgcggctccgaagccgcgccggtgtgaattgtaaaacaaaaagtcttttttccatctcttcgttaggggcgaatgtcagaaggaaaagaataagctcagctttttttcaagctgtccgttgaagcctgaagcttctatatcaaaacagaaaaaagaagtttactttcttttttatttgcatgttgtcacttagcaattaagtataacagattgcccctgaataatcaaatgatttattaaagttccagctcggccggcgttttttcacccgcgttcatgagcttgatctgcttcggttcaatttccagaatcacaaggttcggatcgtcttttccgtcaaaccagcgttccagtttcggatcccacagcttttcttttaaatcggctgagttgttcagtttggcggttccggccacttccacataagcgtcaccgaatccttcacagtcataccctaacagaatatgaacattcggattgttttcaatttcttccgctttatgagtgtctttgctcgtcggcgtgtaaatcgttaagccgtcatggaaaaatgtcatgtagcgtgaatgcggtttgccttgctctaccgtcgcaagcgaaccgactttatgatgatccagtacttcaagcactttttctttgatttcattttgattcatgaagaatcactcctttttaacgtctccgcttttacttttccacattggggagacatttaaaccaagaaatgtgctcttctgccgatcttcgctccattcccgcttcagcatgctgtagttcaccgtgtcatggtaggcgccctgtacgaaaatgccttctctcgtcagtccttctttctgaaatccgagccgttccgctaccgccctgcttttcgtgtttttttcagccgcgctgatcatgatgcggttcaggccgagatcctgaaatgcatgggtgatgaccgcccggcagcttgcggtgatgatgccgaatccctcatgctctcgatccagccagtagccgatctcggctttttgattggctgtatcaacattatggatgctgatcatgccgcaaaaccggcccttcacaaaaattccggcgtcaaacccattctcttccgcgtatttataacgccattcggggatgatcacatctcggtacgtatcgatatcagccagttcttccgcccagctgagccattcgctgagatggttttgatttcgcttcataacagaatacaattcgtccgtatcttctttggcaagcaatctgatcgtcagatgttcccggatttgacaggaaaacacgatcacaccttctttcctttattagccattatacagataaattcatttttttccatacaaaaaaagatgaggcgtgcagcctcatccttaaatgcgcgggtcggtaaaaatgtcgtgatcatccgtgcttggcgatgacatttccgtaatgaccgccccttcttctcccgcttggaaccaatgcttcgtatccggcggaatggtgtattgtccgcccggttccagcacaatttcattccagacggtgtagtattccttgtcttcttccggcgggaggacgcttgggttctctgccttttcgccttccacgtagagatacaccttcccccagcggcagcggaatgtctcttgttttcccttctcgctgccgaccggcggatggcggtgttcgggacatgtctggcgcgggaagagcaccaattctttcgaacagtagcggtcggtattcacgtaaataaacagctgaagcccggtttccttaagcttgcctaagccgtaatccatgatttgaatgtcttcgacttcatcatcagtcagaacgattcccgctttttgatagtatgcattcacgtcatgtttcgatatcgtcatgcttcagcccccttatgtggtcacaaatttgccgccgttgacatgcagcgtctgtccggtcatataagatgattcgtctgaggccaagagcacatagcagccgacatgttcaacaggctggcctgcccggcccatcggcgtagtctgaccgaaggaagcgactgtttcttctgagaatgtcgccggaataagcggtgtccagatcggccccggcgccacggcgttgacacggataccgtcgttgacgagcgcttgcgccatggatctcgtaaaaccgttaatcgcgcctttcgtagccgtgtagtcaatcagctgcggattgcctgtgtaaggattaatggatgtcgtattgatgatcgcgctgcccggcttcatgtaatcaatcgcttttttagtcaaataaaattgtgagtaaaagtttgtcttaaaggttctgtgaagctgctcgcttgtgatgtctttaatgctttctttcggatgctgttccgcggcgttattcacgagaatatcaagacgcccgaattcttcaaccgttttttcaacggcttcattgcaaaagtcttcctcaccgacatcgccggggattaacagacattttacgccttcttcttccactcgtttttttgtatcttccgcatcaccgtgttcatcaaaatagacgatcgcgacatttgcgccttccttcgcgtaagcaaccgctacggcgcgtccgataccgctgtcgccccctgtgataagtgcggttttcccttttaatttatcagcgcctttatattctttgtattcataaacaggcgccggattcatttcgttctcaatgcccggctggcgattttgtgattccgccgggaattccttcggatagttttccatgtcaagttcctccttcttgttcgatctcatatttcttgtctacctcgtcagtcttccggataaacatgaatgagacagttcaaaacgttttcggagaaaaatgtttcacatggaacgcaagaaaaaaacccggctcgcagccgggtttttattttctattatgaacggaccgcttgtttgcggagcacgtcttttctcacttttccaaggttgtttttcggaagttcgctgacgaactcaatgtccggaattttaaaggcggcaagacgttcttgaaggaaacgggtcacttcttcttctgtcaggccttctctgccgtttgtcacgatgaacgctttcggcttttcgccgtagagcggatcagggataccgacaaccgccgtttcgagaatgcccggcacttgctgaatgacctcttcaatctggtcgggataaatattgtcgccgccgtagatgatgacatctttataacgtccggtgataaagataaatccgtcttcatccacatagccggaatcgccggtatggaaccagccgtctttcagcacttttcgtgtcgcttcttcgttaccttcgtagcctttgaataaaaacggacttttcacaacgacttctccgattgaaccttgcggaaggaattcacctgtttccggatctacaacgcggacgtccacttcttccatcggtttacccgcggaagcggctttatccattcccatttgcggattccaagagctgatgccccacgcttccgtgcttccatatccatgcatgagcggaatgccgatgtcgagatactgctgaatcagactgcttggcacctttgttcctcccgtcatcatataaacgatagaagacatgtcagtctgatgcgtttcccatgctttcagcaggtatgtgaaatagactggcagcgccatgatggtttgaattttttctttttcgatgagcttcaggttttccacagggtcctgattgtcggtcataatgaatgtcgttccgctcatcgtgccgaccatctggcagataatcgcgctcgtatggtaattcggatggcatgctaagaagcggacatgctgcattctccccgtgtatgccaatgtcgcgtttacgtagttgtatatgccgccgtgagtgatcatgcagcgtttcggattgccggttgtacctgaggtaaacatcagcaatgccgtatcgttttcagacaccgtttcgacgtccggtgtttcaccggagcctgtcaataaagcgtcaaactcaggcgttgtctccgcagctgttcctgttacgaccttcagtttaagagaagatgtaagcgcaggaagcacttcttccatgatctctttaaattcagtgccgtaaaaaacagctttcggttcacaggcagctaaaatgcctttcatttcgtaaggtgttaattgccagctgaccggcacaacaaccgcgccgatttcgagtgccgcaaacatgacaatggatgccgcgtggccgtttttgcaaagcatcgccactctgtcgcctttttttattcctttatcaagaagcgcttgtgcaagctggttgattcgttttcgatattccgcgtaggtcagggtatgcgtaccgctttttacagcttcgatctcttcgctatttgaaatgtcatgcagaatcagatgctgtaatgtctccatattttcatctcccataatgataaatcacaaaaaaactctgtcagattttctttctcacgcaacccattttaaaccaaaaaatataacttgtaaaactattttgttttagaactattccatcggtgaatgatacaatagtcccgtgtttttagtttcttcccttccccttaccctcatacatgcacaaaaaaacacaccccacatgaggtgtgcgctttctgtttaccgctgtcctttctcctgaatgaaatgataaaacagcttgtttaaacgtttgtataaatcggcctcagcctcagtctggaaggcttttatactgtcttcggactcgatgatggccgagctgaccgcacttagtatttccgacccttcagcgggcatatcagccggcgccatcatcaccaaagcgcggtcgacggtcagggaatttccgtccatgcctttgacactgcatggagctgtcaaatcataaattttgaaaaaaggcgtgacaatttcttcatttttgagatggtacagagccatcgccgttcccgggatgccgagtccgccctgtcgttcacgctcagcaaggcgctgtgcggtttttcgggcattatgaaccaatccttcttgctccagcatgtcaaacatacggttcaaaaacagctcatacgccgtgtttgaatcaatcgatttgatcgaaaagttccgcagcacgctttggataaccgccgcgtaatgcgccatacggccggccgcttccagcatatcaggcgtctccggctgcttctcttctcttttaccgtttctttttttgtcaagaatcagcggaatttttcttttgatgtactgcttgacctgatcagcgtcttcttcgtttaaaagcggactgaccatgacgtaatctatgtttccatacgggatcggaacggtggatacgatcatgtcatacgcggtgatgtctcgatccttcagttcgatgagggaagacatatcaaaggaacggatttccggaagctcttttttcagcctggatgcgagcattttggatgatccgatgccgcttgaacagacgatcagcgccttgatcttcgcttcttcccgtttgatttccagagcggagccgaagtgaagaacgatgaaagcgatctcatcatcagagaaaagaagccccggaaagaatttttccattccttcttctacggccatgtacagcagaaagtagtcgcgtttaatttgctcggtcatcggattgtacatgtcgatattttcttttacccggttgatcgcaggctccagatgggcgattaaaccgtcgtataaagaaccgttttccgtcagatcaattttaattttttcagaaatgaagccgatcagctgcttcgtttgcaaggccgtttcaacctctatgtcttccggtttgaattccgttttgtatttgcgattggcgctccgcaaatgaatggtgatatatccgatctcagcttccggaattgaaacgccgaacgctttttcaagctctttcgccatttccagcgcagagccgtactccttcgtctgctgcagcgattttagttccgaatcctccatcgtaatggtttctccgagcctgatccggtccatcgcaaaggttaaatgaaccgcaagcgccatgtatgagctgtcagataaggcgatcgcgattttttccttgagctgaattaagagccggtccattttcaaaagttccgctttatttacgacgccgaacattttttcagcatcgtccggttttcctttaatattcaattcaaccgcttccaaaaagctttgaatatcaaggcggttgacgatgagattgccgacgattttccgtttcgcattttccggccccgtcagctgaatgccgaagcccctttttcggatcagcgtcaagccgaagggcgcaatccaagtctccagctcatccaggtcatagctgatcgtcgcgtttgtcacttgcagttcgttcgccagactgtagagcttaatcggctcttgagactctaatagtgaacatagaattaaaagtttccgctcctcagcgctgtattcatactgttcataggacaggtctgacaggagtttatgtttgtcctccgggtttcctaccgctttcagtcctttgccgggctgtttatcaagtgccagaccgaatgattccatcatcggtttgattgtttttaactcgcggtgaacggttcttgtgctgacttgtaaagcttccgccagttcatgcactgtctcgtaccggttctgcagtaaaagatgtttcattaatttttgttctctcgctgtcatatacatgaaacgcgcctccagattttctagttgtgagaagtatggcatatggggagtgctgccggggaaagtggtgtaagttataatataaaacgctttcaatgattattcaaccattttcaaatggcaatttggcactgggccgtgtgacagtattgaaaaagaaaaatgtgtcagataatatgccatgacgcttgttactcttgatccgcacggctatacttcaaagtgaccttacttgtttttagacattgcacaccacataaacaaacgcccggaagctagcttccgggcgtttgttctgtttatggaatatcgcaaccttggacaccggtataaatccggaaccactgatcatggctgagtttgtacgcggatgcacgcaccgcggcggaaatgcggttctcttttccgctgccgacaatcggcatgatgtctgccgggtgggtgaacagccatgcgtacatgacttcgtcaatggaagcggcgccgatttcttcctgtacggaacgaagcgcggcacggattcggaggtccttatctgattgtcctgtaaagacgctcccgcccgcaagcggtgaccacgccatcggcggaatgcgtttttcctgacagaaatccagcgtgccgtcatgaatattttccagctcgtacgccgagatttcaatttggtttgtgataagcggatcatccaaataggattcgagcattctgtactggtgcgctttaaagttcgacaccccgaaatatctgacctttcccgagcttttcagcgcgtgaaacgcttcagccacagcctccgggtccataagcgggtccggtctgtgaatgagcagcacgtccagataatccgtattcagattcaaaagcgactgctccgccgacgctaaaatgtgagacttcgacgtattataatgatgcgacttgtttccgggccgttccggtgattcaatgacaatcccgcattttgtgacgatttcgattcgctcccttattgaaggcgaaagggataaagcgccgccgaacagcttttcacacgtataaccgccgtatatatcggcatggtcgaaggtggtgatgccttggctgatgcaccattcaatcagattcagcagctctccgtctgaaacattccattcattcagacgccaaagcccgtgtatcactcttgaaaattccaggtcttcagccaattgaatgcgctgcatgtgaaatcccccttttttcttagagcctcttgtatctgtgttttcaggaattgcccatgctgtttcattctgcttcggcggccgattttcctttcagcccgcaaaaatcgtcatttaatgattctgaaactgctttttcgctttttcaacgacgtaatggcttccgccgcgttttttgacgtcttgaatcatcatcgcgatcaagaggtctttctttttataatcgtaaccgacaaaccagccgttttctttgccgtctttatcttctttagacgttttcagctcggctgtaccggtttttccggctacggtaatgccgcttacggccggctgatatgcagagccgcgcggatcttcaacgacgcctctcagccctttcgtgatttcttcggcattggctttcgataccacttgcttatgccagatttgcggcgttttttctccgtctttgatcaatgtcggtttgacaagatttccgtctgttacaaatgcggtatagtcagccgctaagtgcagcggagacatcatcatctgcccctggccgtagcccgtatctccgagaaggatctcggaatcaagcttgccgttagcgattgaagacttttcaatcggaaattggtacggaatctcttcatcaaagccaaatgtttttaatccttttgtaaacgcgtccgctccggcatctatggcattttgcgcaaagtagatgttgtccgatgtgatcagcgcgttttcgagatccacttcattcaggcgctctgatacgcgtgtgacatggtaaccgccccagctcgaatctttctgccactcttttccggtgatttttttcttttccgacgctttcaatgtgccgtttgtcaggccgactgccgcggcaatcggtttaatcgttgatcctggcgcatagagtttgttgaatttcgctgaaaacggattgtttttatcttcattcagctttttccattctttgccgctccagccgaaaagaaagccgttcgggtcataagacggtgcgctgacgagcgcgagtgtctctcccgtttgcggttcgagggcgactgccgctccgctgtcatctttcatagaatcatacagcttcgtctgcgttttcatgtcaatcgttacatgaatatcctgcccgctttcggctttcttttcagcaatgacctcacctgtttgcgggacgtaaattttccagccggccgtgccgcgcagcttgtcttcatatacattctcaaggccggcgatgccgattttggaagtatcactgtattggccgtctttcgcttttttcagctgctccgctgtgatggttttaatatagccggtcagatgggccgctttttcgccgtacggatagtagcgggagctgactttcgttttcgtcacgccgtctaatgcgagcaagcttttgaccttgctttcatcatccggtctgattttttgaatcgggacataggagtcgtcttttacccagccctggttcagtttgcttttgatatcgtcttcagaaaggtccagtttttcagacagttttttgatcacgctgtctttatccttgccgagttttccagggataatgccgatttccggcacctcggtattcacggcgagaccttttccgtctttgtcgtaaatttgtccgcgcttcggttcttcatttgcgatctgcacggttttgtcatcggaaagctgtttgaaaataaaagaaggattccagtcgatgttccatgattctccatcgtctgttttttcttttttcaggacggccgtgttttcaaaagcgaccttccctgcttttgtatccatgctgaccttataatcgatgtgctggaggtcatcttttttcttgtcgtcttcgtcctgtttttcggcagtgactttcagatttttaacccctgcttgttcataaatggtttcatatcgttttacaaaatcctttttggatagttttttcttttcatcctgggtgaggctttggtacatcttatcgtaatgaccgccgttccagtcttttacgaaatctttcattctgtcttcggccgattccgttttcgagcagccgatcaaacctatgattcctgcgagtaaaagtaataggtataacccttttttcactgtctattcccctgccttccaactgttattttctcctaaaccaaatcaggctggcaaggatttttttctcatagtgtttaaaatttttttgtttttcctgccgtcacgggccatgttcttatacaatgtatctattaaaaaaagggggaatttcagatgatcagagaagcagccatgctttatgtaaaagaaggtcttgagggggaattcgaagaggtattccgccgggcggagccgattatcgcgggtatgaaaggttatctgtcccattccttgtccaaatgtatggaaaagacgcataaatatttgctgcttgtggaatgggagacattagaagatcatacaaaaggctttcgcggatcgccggaatatcaggaatggaaagccttactgcaccgtttttattcaccatttcccgttgtggagcattttcaggatctatcagactcagatcgcgtgaagcgtaaaaccgattaaggagattgaccatacaaaaacggcggtatagatattgaatttcccggagccgtcgttttctttccgtttttcctccagcccctgaatgaacatgaccgcaccgagaaacacgagcataaccggctgtatgacagaggtatgttccgcatacgtaaatgcggcggccgcaagtataataatcagcatcgcgagtgacagttttaaggcgcgcagcaaagcaatccatcctttctgttatcattttttgaacacaattctatttctgtctttatcccccattattctagcgtattttttgcgcggatagaacgaaagtcggacaattttaagtttgttttaaggagcacgaaaagcgcgctcccgatgaaaaggagcgcgcggttatgagcgggcgaggcttccgtatccgagcccccgcaggacgcatgccatgacttcataccccttgctgttggggtgtatgcggtcatgagaaagatattcattcatttttcctttgaaagcgctgtggacgtcggcgattttgacgtgcggcgccgatgcgagtgtgctgaggtgcgcattataagaggatatccatttttctgcaatggagatgcccgggaaaggattgtataaattaaagacgcggatctcataaggagacgggtgcggcccttttaaggcagcgatcttggctatcatcttttcaaagttctcatggcagtgactggacacgctggtgaacaccgaagcgtccgatgtttgctgatatgcctgaaccgaatcgatcaaatcgttgccgcagcctgtaatcgtaatcatatcagcagcctgaatccgcctctgaatgtacggcaaggacataagcccgagaatttctcccgtctcaaggcctgatttggcaaagatggatacgtcggttcttgtctgtaaatcttctgccatcatgcgcccgaaccgctggacaaaaccggcggaaaacggcccggatcccctccccgtcgtcaaagaatcccccagcgccgtataaacaagtcccatttactttcctccactcgttactatcgatattgtaatgtacgcgagtgaagaaaaattggctcggtcaataacccaatttctcagaaatatgctgtgcggcgtttttgaccttttcggttaaatacggcagcctgtcctctgaaaaccgggcttcgaagccggcgatgctgattccggcagccaccttaccttcgtgattgaaaatcggcgccccgatcgccgccgtgtaatcttctaattccgaatagctgatcgtataacctgattgtaaggatctttcaatagattgaagcagttcagcccgatccgtcatcgtacctgaggcgattgcggcaagctttgtcttctgaatgtatgtgtcaatctcctcttttggcagaaacgatagaatgcttctggcgcacgctcccgcgtacagcggagaccggcggccgattgccgtatacaggcggacggtttgggtgccttcaattttctcgacgtaaatggcttcatccccgtccctcatgatcagctgaacggcctcatccacttcgccgcacagctcttccataatcggtttggctattttcctgatatccagacgttcagagacgagctggccgaattgtaaaaagatcagaccaagctgataacggccgtctgccgcccggatgagaaaccccgtttcttccagcgagcttgccatccggtgaaccgaggtcttcggcatctccgatagagaaaccagctcatttaagctcaggctcggttcagtcagaaacaaatgaagcagttccattgatttgatgacggttttgtttttgttttccatggtctttagcccctttgtcagatcagccattccattttgagccttgctttcagctccttcagctgctgttccttctccaaaagcagcatttccgcttcctccagcgaaacggcccggaacgtgatatgttcccccggcatcgtttgggcgacgagaggaagatcggcgaatatgatatgcgccatccgcggatagccccccgtcgtctgtctgtcagccagcagaataatcggattgccgtccggaggcacctgcaccgttccgaacgtcacggcctcagataccatctccagcggctcccgcaattcaagcggagcgcccttcagccggtagcccattcggtcggattgaggcgtgaccgtatatgactcttgataaaaacgcaattttgcttcttctgtaaaagcgtgaaattgagcgccttcaagcactcgtatgaccggattttttttcagcggcagaaaccctctgctgctgacagaccaatcaggcgctgagaaaccatgctgtccgaaagcatcgctcagacggtacgcgattgattccgaacatggcgtcatacggccgagcggcagctcatcatctttttgcagcgctcttccgcaaaagccgccgatccccgctctgacatacgtgcttttgctttccatgacggcgggcacgtcaaatccccccgcgacggcgagatatgcgcggctccccatcttgcacggcccgaatgagacgacgctgttttcctttatcaaaaccggtttccacagaggagcgggctccccattaatatgaagggcaaaatcagctcccgtcacggcaataaccgcaggttctgaaaattcaaaggaaggcccgggccccatgagcgtaatttccagtcccgcctctttttcttgatttccggcaagaagattggcgatgcgcagagagatcgtatccattgcgccgcttcccagcacaccgtatttctgataacccgtccgccccgtgtcctgaaccgtcgtcaagagaccgggctttaccactttcatactcattcggctccctccttgatgcggctgtattcctctgccgtgatccggacgaatttcaccgtatcgcccgctctcaaaagactcggcggatgttcttccggcctgaaaagccggagcggggtgctgccgatcagctgccagccgccgggagtggatatcggatacacaccggtctgcattcccgcgattcctactgaaccggccgggatggacggccttggtgacgcctttctcggcgctctgatccgctcagacattcctcccaaaaacggaaatcccggcgcaaatccgagcatataaacgagatattcgccttcagtatgaatgcggatgacgtcttccggggtcagatcgttcatctcagcgacctcttctaaatcgggaccgaaatcaccgccgtagcaaacggggatttccatcacccggcgctcttcctggcggtcggtcattatatggctgagacgttctgtcacttctttcttgaccagggcaaaaggagagacgcctttttttatgtttgagacggcatacatatcataaaagatcgttaggcttgtgaatgccggaatacattcaacgaagcccggaaacggccgttcttccatacaggctgccgccgcatgcacccggctgttgacctcttcgctgatgtgcccgccaaagcggatgataacggcggaatcaccgtacggctgtatatcaagcgctgtatttccgctatactgcatcattgtcatcacctcgttgtattctttctcacttacaggacagcaagcgattcatttcgtatatcggtgatcagcatgtgccccggtgaatgtgttatcacaatatcaggctttgcttccatgatcaccgcctggggtgtaacgccgcaggcccagaatacgggaacttcaccttcccgcaccgttacggcatctccgaaatccggctgttgcaaatcgctgataccgatgctttgcggatttccgatgcggacgggggcgccgtgcacggcgggaaaacgtgacgtgacctgcgccgcgcggactgcaagcctttccggaatcggtctcatgctgacgaccatctttcccgaaaacgggccggcgggaacacagtcaatatttgttttatacatgggaacgttcacgccttcatcaatatgcctgattggaatgtgctgattgataagagcttgctcgaatgaaaaactgcagccgatcaaaaacccgacatcatcatccttccaatacggcgtaatatccgttacctcttcagtaagcacgccatgccgataaatcctgtatttcggcaaatccgtccggatatcagctccctgcgcagctattgccggaacaggtgaacccacatccgtcacatcaagcaccggacaaggcttttgattgcgctggcagaataagagaaaatcaaaggcaagatccttttgcaaaacgacgagattggcttgtgcgtaagaagcggccatccccgccgtcggcccggtcatctgcccctttctgatcagctgtctgacttcttcggggctcatgtcactcatatggtttttcatatcatcagctccatagctgcggcatctgcgtgaataatgtatagatgcccataaccgccatgacaaccactacgatcgcccctgcaatcgtgagccagatcggatgcttgtaatcgccgacgatttttttcttataagcgcccaacagaatcatcgctaatgcaagcggcagaattaagccgttaagcgaaccgaccgcgaccaaaattttagcaggctggccgatcgtgacaaaaataagagtggatacgatgataaaaccgataattacgccatgtgagtgcttttcgatttttgccgaaaacgatttgaagaatgacaccgatgtataggcggcgccgatgacagacgtgatagcggcagaccacatgatgacgccgaaaattttatagcctacatttcccgccgcaagccggaatacagaagccgccggattatcaggatcaatgcgcaggccctttgagacgacgccgagcacggcgagaaacagggcaatccgcataatcgatgtaatcagaacgcctgtgatggagcttttcgtaacctgaggaatgacttctttcccttggatgcctgaatcaagcaaacggtggcctccggcaaatgtaatgtacccgccgactgtgccgccgacaagcgtcacgatcgccagcacactgatatgatcaggcataaaagttttcacaacggcgtgtccgacgggcggagccgtcgttacggcaacatacaccgtcaatacgatcatgacgatgccggcgatctgcataaaacggtccatgacttttccggcttcctttatgacaaaaatcagcaccgcgaccgctgcgctgattaaagcgccaatctccggtttgatcccaaataatacttgaagaccgagacccgcgccgccgatgtttccgatattaaacgcaagtccgccgagcatgaccagaaaagcaatggcataaccggcgcccggaagcaccatattggcaatctcttggccgcgctttccggaaaccgcgataatccgccatacattggtttgcgcgaaaatgtccaaaataatagaaattaaaatgataaagccgaagcttgccgccaatgtattggtaaacgttgccgtttgtgtcagaaagccgggcccgattgatgatgtcgccatcaaaaatgtcgcgcctaaaagaatcgaccatttgccggaagcctttccggctgtttttttcttttgctccatgctgtcttcctccctctgctgctcagtcttttgcaagcgcgctgatttgaatgtctgccgcttttaattcttttttgattgtttttgcgaatgtgagggcgtgggctccgtctccgtgaatgcagaccgtgtccgctttcaggcttacagcttgtcccttacgtgatgtcaccgtgctgtctttcaccatttgaatcacttgaccgaccgcttttttgtcatcctgaatcagcgcatccggctctgaacgcggcgtcagcgtgccgtcttcctgataggtgcggtccgcaaacacttcgcttgccgtcctcagtccgattcgatctcccgctttaatcagctcgctaccggaaagcccgaaaagaataagcccgggatcaaaatgacagaccgcctgagcgatggcttctgacaggccgggattgacggcggccatattatataaagcgccgtgcggcttcacatgctgcatctcgacaccttctgcttttaaaaaccctgacagcgcgccgatttggtacagcgtcagatcatacgcttcctcgggtgtaatcgcgatctgccgccgcccgaatccctgcagatcgaacagcccgggatgagcgccgattttcacgcctttttccgccgcaagcgcaaccgttttgcgcatcacgctgggatcacccgcatgaaagccgcaggcgatgtttgcagatgtcacataatccaaaatctcttcatccagtccgattttataagcaccgaaactctctcctaaatcacaattgatgtcaatctgaaacataagatccctcctgtattgtaaacgttttatattattatcattccgctattcggaatgactattccgaattgttgaatttctcttcattatatttaattctggcaggtttgaacatccttttgtcagaaaacctaccatggacctagtcataaatctgacaaaacaaaaaaaagagagcctcatactgagactctctcttttttctattataacacccagtggcggatcgctttggcgaccccgttttccgtgttgacatcagtcacccagtcagctgtttctttcacaatgtcctgcgcattccccatggcgacgccgacacccgctttttcaatcatggcaatgtcattcagactgtcacccatggccatcacattttccatcgtgaagccgagtttttccgataccttcgccagcgcagccgctttgttgataccgagggcattgacttcgatgttgatcgggctggagtttgtgatctcgagctccttgtattccttgagctctttcagcacctcattccgcacttcgtcatcctcgatttcgaatccgaacttgagccactgatgatccgtaatcgtttccgggaattcccctctccacactctatcgacggtagaggcccagaaattcgtgttgtgcttattcctcagatcccataatttttgaatatgatcggtatgaagaagcttgcgctcaaccagctcaaagttggaatcccagatttcgctgccgtttgccgtgattaaaaaggatgacagctcgagagactcagccagttcgcggcaggtcatcagcgtgcgtcctgtgctgatgacgacgtgaattcctttcgcctccgcttccttgatcgcccgccggttttcctccgggatgagctgctcgtcattgagcagggttccgtccatatcaatcgcgatcagtttaatatctgcgtcttctctttgtatcggcatatatgtacctcactttttataatgtagtcgtctctattttaatacatatgacccacaggaacaaaaaaccgcttcctgcgtttggcggggagaacgttgaggaaaagaaatattgaggtgatggaggatgaaagaaagaaaacaaaagaacaaaccgaatgaaaatcctgaacatcatgatttaaccgatccgattccgctggaagagctgaaggaaaacgccaatgacgaaaaacacaaacatgaccaaagggacaattcacaaagtgaaagagattatgatacaaaataacacgcttgtccgaaagccgccgatggaggcggctttttttacgatggctggataaatatgctgagctcagcttccgccacaggcttcccggcaacggacgctttcgcccggccgaacacaaaaccgcgcctgattcgcgtgacctcaaacaaaagatccagacggtctcccggcaaagcggcacctaacctttccgctttcttcaccgcggataagagaccgaggctgtcaccgccggtaattcccgcgcaagccgccgtttgggccattgcttcaacgacgagcgaaaatggcatctctctttgggattcagttataaaccagtcattttcactgatatttttgtaagcagccgcccattttccggcttcactgttcgtcgtgccgtcaattaaaagaaacggataacgatgtggcaatagcttctgattcatcacgcagcctcccttccctctcattataacgcaagaaaaaacccgcgtcccccgacgcgggttcatttttattgattgagctttttgagcacgatgccgtgcagcggttcatgcggctgaataccgcaaatgtcttgaagaacgccgctcgtgcctttttccgcgataagcttttgcagctcaaccgcttccggatcatcctgatagtcaaagcgcagggcggcggcgatgccttctgccagcgcgttcggttcttttatttttttggccggccctactaatctgtcattcgctccgagttttctgagcggtgatctggcgaccctcgtcacatcatccgtgatgtattcattttcaaagcggccgatgatttttttcatgtactgctcgtgttcggattgcttaaagccgtacgctttcaccaagtactcgcccgtttctgaaagtgcatcgtacacgacacgccggatttccggatggccgatggcctctttgacggtttttaatccgcgctgatagccgacgtacgccgtaacggcatgaccggtattgacggtaaacagctttctctcgatgaaaggcgtaagatcatccgtaaacaacgcaccttccagtaccggctggccgccggcaaagccggttctgtctatgacccattcaaaaaacggttctacggatactttcagcggatcttcatggtgctgaatcggcacgatccgatctaccgcagaatccgggaagccgaccgtccggttcacgagttcccgctccgcttccgtcaaatgtccgaaaacttcttttttcagaaaactgctgccgccgatcatattttcacaggcaatgatattgagaggctcagaagacgttctgcgcttcagcccttccgcgatggacggggcgatgagtctgagaacgttcgggcccaccgccgtcgtaatgatcgccgcttcattgatcagcctgtacagctcttgttcttgcgccgcgctgttgatggctgaaacggggccgatgatttctgtctgccggccgccgtcggcaagctccacggtatattccttcttttcattgagaaggctgaccatcgtttcattcacatcagcgaaaactacgtcatagccggaatgatggagcagggcgccaataaagccccgcccgatgtttcccgctccgaaatgaagggcaatcatgtcagttcacctcgctgaaaatagcggccagttcttcttccgtctttgcactgatcagccgttcgatgttttcttcctctgagcagatgatggcgatgtttgacaggatgtctaagtgttcattgttttttccggcgataccgaaaacgacctttgccgtattgccttcaccgtattccacaccatccggaatctggatgacggaaatgcctgaatgaagcacctcatcctttgcatcttccgtgccgtgcgggatcgcgatgaaattccccataaacgtggatgatgtttcttcacgttcgaacattttttccacatagccgttcttcacgtagccgttatcaatcaatgtctgtcccgcgaggcggatggcatcctcttttgagttcaccgtctggttcagtttgatgttcgctttagccaatacttccatgatgaagatccctctttctgtttgattagtttttaagcttttcaatcagttcatcgtatttcgggctgttcaagaaattatcaaccgaaatgtgcaccgcctgcggcagcttcgctttcgcgcggtcagtcaggtccttatgcgtaatgacgatatccgcgtcattcggcagattattgatcgacgtatttgtcacatcgatatccaggtctgcttttttcactttgtttcttaaaatggaggcgcccattgcgctcgatcccatacccgcgtcacacgcgaagataatgcggctgacttggtcagcggaaatatcagcggcgctgttttccggctcttcctctttgtctgccaatgcggccgccgcttcgcttttcctgcctttcatttcctgcattttttccgccgcggctgtcaaatcttcttcgcccgctttagacgatttcagaataagcgccgagacgataaacgatacggccgcggcaacgatgacgcccgccagcacgccgagatagcttcctttcggcgtcagcgccaaaatggcgatgatgcttcccggagatgatgcggcgacaagacccgcgttaaagatcgagaatgtaagcagtccgctcgctcccccggcgatcgccgcgaggatcagcatcggtttcattaaaatgtaagggaaatagatttcatgaatccccccgaagaaatgaatgatcgccgctcccggagccgtcgatcttgaagagcctttcccaaagaacatatatgccagtaaaataccgagtcccggcccggggtttgcttccactaagaacagaatggatttacccgctttggcggcctgctcgattccgatcggacttaaaatgccgtggttgatcgcgttattcaggaacaggactttcgccggttctacgaaaacgcttgcaatcggcagcaaattcgcgtggacaatgacttccacacctgccgccagcaatttgttaagagacaggacgaccgggccgatcgcataaaatgcgataatcgtcagcacagctccgataattcccgccgtgaagttgttgatcagcatttcaaaaccctgtctgactttatctttaaacacacggtctaattgtttaatgagataaccgcccaaaggccccataatcattgcccctaagaacatcggaatgtccgctccgacaatgactccgatggcggccgtcgctccgacgactcccccgcggtgatcgtaaatcatttttccgcccgtatatgcgattaaaagcggcagaagatacgtaatcatcgggcttaccaatgtattcagctgcggattcggaaaccatcccgccggaataaacagcgcggtgataattccccatgcgataaatgcaccgatattcggcatgatcataccgcttaaataactgccgaaccgctgtatcttcactttcatgccagcttgctgttcttgctgcatgttcattccctccctgtttgcttgccttcagatgaaaataaataagacacggggttcctctctctcccctgtgtcttcatcataaaacgcttacaatccccattcaatgaaaagtaaagaggagtttggcacagagactgtgacaactccttaacaaaaaaaagacacctcatcaaaggtgtcttaccgctttctgtatataatgtgtcctttagtgacgacgagtttggcaatgagccgctcactgacaataaacaccggatacgcacatacgagcgcgaaaatggcggccggcacataccgcgctgccggaaacatcggcatgacggcggttctggccatctgcacaagataaatcaaaagcaccgtgatcgcaatggccacagccataatcggagcggatactttatattcacgcaatttcacatggcaatgcccgcactgaaactggcatgggatcatggatgatctgaccatgtcgcctgtaatcggcttgccgcagttcgggcaggtcgtttctttcatgtttattcctccattcaactcttctattataacagagtctgactacgtcttttacatttgtgattgttcaacattttttcacatattttatcatcaggctcttgtgtgcatttgtgaaaacatctacccttagagggaggttcatcactcattcgcataaaaaggaggatgcagaattgcttccgattcacagacagcaaaccttgcttgaatggctgaaagaagagggcgcgctgaaaatctctgacataagcgagagattcggcgtctccgagatgaccgtgtacagagacgtcaatcagctggcggatgcaaaccggattatccggacacccggcggcattacgctccctcccgcttcagaaggaagcgccaatcaatgcggctattgcctgcggccgattcagcattcgtattctgttcagcttattaccgtttcacaagccgttgagcagatgtgctgcattcattgcgcgattttgcggtatgaggataaaaaggaagaagtgtcccacgtcatttgtaaagattttcttctccagacgacgctgacggccgcttccgcatactttttagttcatgccgatattgaccttcactgctgccggcctcaggcgattcccttctcaacgcttgattacgcagaacggtttcaaaaaggattcggcggggtcatttgcacctttgacgaggcggcggacatcatcttacacgacaggcagaagggatgcacctgcagcaagacataacaacaaccaaccggaaggcggtgtcatcatccatgagacagaacaaacgctggctcatctttttgctgttccttgttttgattccgaaaacaagcttcgcccacgcctacatcacaaactcaaatccgggtgagaacagcgaattaaaacaagcgccgaagcagattgaaattgagtttaatgaacagattgaagaaggcttccactccattaaggtctataattcatccggcgaacgggttgacgcgggcaaaacggtgattcaaaaaaataatgcccgcatcatgaccgcggcattgaaaaaaaagctgccgcatgatatttacagagcggaatggaacgcggtttcggccgacgggcatccggtatccggcgtcatccctttcagtatcggaaaagccggcggagaacttcaggagcagacatcatcgcaagcggcgcttcatcccgaagcggccattgaccgcggtattttgtacaccgctctctccctgtttatcggcacggcttttttccatctgttttggtacagaaataataaagattcatcaaaagcaaaacgaactgtaaagctgctcgtgatttctttatgtttaacggggctcgcgcttatctgccagctcccgatccagacgaaagaaaacgcgggcggcgcttggagcgccgcgtttcagccggactatgtaaaagaaacgcttctgaaaacggcaggcgggtacgtctggatgatccagatcagcttatttatcctgctcgccctgtccatgatcccgctgctgaagaagaaagcattccggtcatttgcgtactggacggcgccgctgttattcttcttcgcttcgcttttggcaaaagcattcgccgggcatgcggcggttatcgacgaaaaagcggtcggcatcgcgatggactttctccatttatcggccgcgtctgtatggatgggcggtatcgccgcgcttgtgctgcttctttcatcagagtggagaaaacccgataaaaccatcgcttgggaaacggtcagacggttttctccttgggcgttcgcctctgtcggtgtgctgttattttcaggcgtgctgaacggatttttcattatccgcacgtttgattcactctttcacaccgcttacggtaagacgctccttttgaaaatcggactgtttgtcatcatgcttgtgctcggcgccgttcacgtatggatgacgaagttcagcagaaaaaggagcatcagcgcaacgataaaggccgaatgggcactaggcattgcggtgttattcacaaccgccgtcttcacaagcctgcccagtccgccgccgcctgcgccattgccttttaacggctcagaaacgatcggaaacggggaaaccctgtccttgcacattacgccgaaccagccgggtaaaaatgaatttcaagtcattgtcaccgatcacaacggcagcttggtaaaagacattcagcaatttacggtcactgtttaccagacgggcttcagcggcaaacagcatgaaagcacctttgatttgaagaagacgaaggaaggcacatttgaagccgtcaacctgtccatcaccgaaaagggaaactggaagatcaaagtccacgggctgacaaacgattttaatgaaatcaaccaaatattctcaacgacaaactaaggagtgtatctcatgttgaaaaaaaaggctttattattcatatccgccgtgaccctgtcactcgtcggttttacggcgacagcaagcgcccacgtctcagtcaaacccgcggaatccgcggccggttcttgggaaacgtacacgatgaaagtgcctgtggaaaagaatgagccgacaacgaaagtcgtgctgaaaatgcccgccggcgttgaatttcagcagtatcagccgattccgggctggaaaacatccgtatccaaacatgatgacaaagcggtctccgtcacttgggaagcaaaggacggcggcggcattcagcccggccaattccagcagttcacgttcgttgcgaaaaatcctgaaaagagcggagatgccgcttgggacgcttaccaatattacaaagacggcagcattgtagaatggacgggtgatgagaaagccgacacgcctcactcgattacgaaaatcacgaaatcggccagcgtgacggatgcgcacggagctgaacagtcaaacgaagaaagcaaatccggcgtatcagcgcttgatattgcggccatcgttctgtcagctgcggcgattatcctttccatcgcggcgcttgtaaagaaaaaacgcgcgtaagcaaaaagcgatccggctctaaagagcctgcgatcgctttttttcttatccgcggcctgcctggaatgacggatatttggtcattcctccgtcagcaaacagcgtaatgccggtcacgtagcttgattccttcgacgcaagccagacggcgacagccgcgatttcttccggctcaccgatatatcccatcggaatcatgctttccacatcttttctctgaacgggatccgcaaatttttccgcgttgatcggcgtattgatggctcccggtccgatattgttaacacggatgcgcttcggcgcgtattcaagcgccagcgtttccgtcatcaatttgatgccgcctttactcgccgcgtagtgaacaaacagcggccatggaatcatttcatgtacgcttgacatgttaatgacgtttccttgaatatcattctctacgtaatatttaatggcttcgcggcttcctaagaaagcgccggtcagattggtattgatgactttgttccagtctttaagcggcatttcatgcgactgaaccggattttccatgccggcgttattgatcatgacatccaatgtgccgaattccttcaccgcggtctgcacgatgtttttgacatcttcttcttttgtgacgtctccttgaacgatgaccgcttcgcctcccgctttttgaatctcttctttaacggtttgggcgtctttttcattactatagtagttaaccacgactttcgcctgctcctgtccgaagcggatcgccatcgcttttcctaatcctgatgaagctcccgtaatggcaacgacttttccttttaaatccgtgtacatgttcaaacctcctgcatatgttatgaatttgatttcgcaacgcctaagaataccgcggccacaatgatcaggataatcccgatggcaatggcgaccagctgacgcttcgttttgctctcacggagaatgaagattccgccgagcgtgctgatgacgatccccatttgagagagggaaaaacttgtcgcaactccgacgcgcggctgtgagatgaacagaaacatattcccgagcgcccagatgattcccggcagaatgttcttgagggcgtacttattaaacggtttatgcttgtacgtcaggagcagtccgccgatgaccatcccgatcgcctgcggcagaagcgctgaccatccggatacgccgaacagccgggccacaacgacatagaccaaataaccgagcgtggagatcagcaggatgacaatgcctttttttaagtttcccggttctccgtccgcccgcccctttttatcttctaaagatgtgagcacaatcccgatgatgataaaaataagggcgagaatacccagcgtaatcgcgatcggggttgaccattctttgaatacgatcacaccgaacaaagaagtcgagacgagctgcattcccgttgatatcggcatcgtttttgaaacgcccatcagctgtatgcttttaagctgattgctttggccgagcgaccaaaacagccccgagatgatgccgacaataaaaatgcgcccagacagcaccgggtggacaaacagatacagcacaaacgaaacgatgagcgccccgattgtcgttcccagcgtctggctgtaaggcccgccgcctaatttgacgttaaataacacgatgctcccccaaaataaagccgggagaagagccagtaatatatccatgatggcgaccttctttcaatcgtatttgctgttattttgtctggaatcgaaccgattattcccgcaagatcaaaaaagcctgccggcgatattcaccggcagaccgctcaataaaaacagccccgcttagtagcggggctttcttttcggctcattaaagtccgatagacatgtatttggtttccaggtacggttcaatgccttccgtaccgccttcacggccgatgccgctttctttcattcctccgaacggcgcttgaaccgcggacggaccgccgtcattccagccgatgatgccgtattcaagctgttcagaaatatagatgccgcggcggtagttttctgtgaagaaataagccgcaagcccgaacggcgtatcgttcgcaagcttgatcgcttcatcaatatctgagaacgtaacgatcggcgcaaccgggccgaatgtttcttcatgcatgatgttcatggatgtatctacatttgaaagcacggtcggcgtcacgaaatagcatcctttttcatcgttttggtcatacgttccgcccgtcagcacttttgcgcctttttccacggcgtcattaatttggccgacgattttatcgaagccttttttgttgatgacagggccgacatttacgcctttttcaagaccgtttccgactttgagtttcgcagcttcttcactcagttttttcgcaaactcgtcttttacggattcgtgtacgatcagccggttcgcacagacgcaggtttggccggcgtttctgaatttagaggccattgtttgggctaccgccagatcaagatcagcgtcttcatccacgatcagcggcgcatgtccgccaagctccattgacatatgttttacggtgtcggcgctgtttttcatcaggattttgccgacaggcgttgagccggtaaaagtaattttacggattttcgggctgctggtgaagacgtttccgatttcggctccgtcaccgatcaccacttgcagcacgtccttcggaattcccgcttcatatgcgagacgcgcaagggcgtaagcggaaagcggcgtatcctccgccggtttgatgatgaacgtacagcctgccgccaaagcgggcgcggcttttcttgtaatcatcgcattcgggaaattccacggcgtgatcgcggctaccgggccgaccgcctgacgggtgacgacaatccgtttgcccgttgtcggcgcaggtacggttctgccgtaaatccgttttgcttcttcggcgaaccattcaatatagccggcgccgtataaaacttctccgaccgcttcttcgtacggtttgccgttttctttcgtaattaattccgcaagttcttctttattttcaacaatcagctcataccattttctcaaaagtgaggcacgttctcccgctgatgttttggaccatgattgaaacgcttgatgtgaacgttcaatcgctttttcaacatcttcggccgtctgctgagggatgctttcgatcgcctctcccgttgccgggttgtacactgttaattgttctggcatattgaacattcctttctctgttatagtaaagccattgaatgcttgttgatgtatcttatactttcatgatagcagacccatccgccggcattccaataattgaactcacagagctgcttcgataatggaaaggccttctttgagctgctcatccgtcacgacaagcggcgtcaggaatctgataatgttgccgttaatgccggccgtcaacagcagcagtccgttctcgttcgccgttttagcgatcgccgcggcttttgctttgtccggttcccgcgtgtccggatctttgacaatttcgatggccgccatcgcgccgagtctgcgcacttctccgatgcaggcatgctcttttttccactcgagcgcttgatgctcgatgatccggccgatctcctcggaacgctgattcagcccttcttcttcaataatatccaagaccgcaagcgcagccgcacagccgagagggcttcccgcatatgtgcccccgagttcacccggcgcggcggcatcaagcatttccgcccggccgatgacgccgctcagcggcaatccggccgcaagtgatttggatacggtgatcaaatcaggaacggctccgaaatgctcaatcgcaaaatacgttcccgttctggcaaaaccggtctgaatctcatccgctacaaaaacaatgccgtgttttttacaaaaagcggcgacgtgctggacgaaacgttttgacggaatgatgaagccgccttctccctgaaccggctccattacgacacaggcgacggtttccggtgcaactgcggcgataaagaaatcctcaaaagcgctgatgataaagtcgtcatactgctcgtcgctcatgccggccggcttttgataatagtaaggaaacggcgcctgatacacctctgaggcaaatggaccgaaaccgaatttataaggcttcaccttgctcgtcatgctcatcgtcatgttcgtgcggccgtggaaccctcttgtaaatgacacgacagcctggcgcttcgtatattttctggcgattttcacggcgttttccaccgcttccgcccccgaattgagaaaaatcgcttttttcgcatgatctcccggcgcaagggcgcaaagtttttcggccagctcaatataagacggatacatcataacgttaaaacccgggtgaatcagatcctccacctgtttcttcacggcctccaccactttcggatgggaatggccgacattcagcgtcccgatcgctccggcaaaatcaatgaatcgtctgccatccaaatcgtacaaaagcgccccttccccttttaccgccatgccgcggtttccattgccgacccccttggaaacgaattgatcccgtttttgctgccactgggcagttgtcacttccgatgatgctgttcgactcatagattccatccccctgcattgttttcttatcattctgacttctttttggtatgatgaaaagtaccaaaatcaatttatccatggtatcagaaaggagcagggtctggatgctgacgatttccattgatcattcggaaacggccgattatatctatcagcagatctatcagcacataaaagcggccgttttgaagcgcagcctgatgcctcacacaaaagtgccgtctaaacgggagcttgccgagacgctgaaggtcagcgtgaattcagtgaattcagcttatcagcagctgctttcggaaggttatttatatgcggtcgaaagaaaaggttttttcgtggaggaaattgatacggtttatcatgaagaggcgccttcgctcctattgcctgatgatttgaaagagcgggagccggataagagcggctggatttctttttctcatatgagcgtggatacggcgcatttccccctgaaaagctggttccgctgtgagcataaagcagccgcccgttcatttcatacactcggagaactcgtccatccgcaaggtttatatgaagtccgtgaaacaatttcgcggcttatttccctgacaaggggcgttacatgccgcccggaacaaatcgtgctcggggcgggcacgcaaatgctggtgcagctgctgacggaactgctgccagaagacgcgctctacgccatggagaacccgggatatatgaggatgtaccggctgctgcaaaacctcgggaaaaagacggcgacgatcagcattgatgaaaaaggcatgtccatggacgaaatcgaaaaacgccggccctctgtattgatcaccacgccttcccatcaattcccctcaggcgtgatcatgccggcttcccggcggattcagcttttaaactgggccgccgaacagagcggccgcttcatcattgaagatgattatgacagtgaatttaaatatgacgccgatacgataccggcgcttcaaagccttgaccggtttcaaaatgtcatctacttggggaccttttcaaaatcccttttccccggcctgcgcatcagctacatggttctgccgcccgggcttttgcggacgttcaaagagagaacgtatgacctgcatacgtgcagcacgcttgcccagctcgcgctgaaagaatttatcgattcaggtgaatatcagaaacatattaaaaagatgaagcagcattataagaacatgcgggaacgcctcatttctgctttggaagaaacattcggagaaagaataagtgtaaagggcgccaatgcggggcttcattttgtcactgagttcgactgcgcccgttcagaaaaagagatattggcacgggcggatgcagaacagctcgatctgtttgcgatgagccggttccgtctgaaagcgggaggcgattcaaacaaaccgcagcttatcctggggttcgcccgcctgaaggagagcgatattcaagaaggcgtctacaggctttaccgggcggttttcggcgcataaaaaaaaccccggaattcggggaattatttaccagcgttccggttctgtctgcaaaatcgcctccagcaggccgggaaacgccgcatgtaaatcatctttgcgcagggaataataacggtgcttcccgtctatgcgcacttgggcgatccccgcttcccgcagcactttgaagtgatgggacagcgttgatttagcgacccggacatcggcgcaggtgccgcacgttttttctgttgtttccgccaattgtttgaccagctctaagcggagcggatcactcagagcatgaagaacctttgtcagctgtaagcgttcggtttcaggatggtttggaatgttcatgagtcaaatgtaacacataaaagcggcgggtgacaatttaggcggtgagggtttttcctttacctttcgcaatgaaacatgttacagttagttcgataatattcgaactataacaaataaacccaatcaggaggaataacaatgatcgttttacaggcttacatgaaagtaaaagcggataaacgcgaggaatttttaggagaagcgcaatcacttcttcagcattcacgcgcggaagaaggaaatgtgcaatacgatcttttcgaaaaagtcggtgaggagaatacattcgtcatgcttgaacaatggaaagatgaagaagcgatgaaattccataacgcaactgaccatttccaaggattcgtggcaaaagcgaaagaagtgctgagtgcgccgcttgacgtcgtccgcacagaactgtcagagtaacgaaaggatgaatgacatgaacgaagtccttcaattattaacagaccatcgttccatccgcagctacacagatgaacctgtatcggatgaacagctggatcttatcatccaagccgctcaggcagcgccgacttccattaacggccagcaatttaccgttattgcggtgaaagataaggaacggaagaaaaaaatatccgaattggcgggcggccagccttggattgaccaagcgccggttttccttttattctgcgctgattttaaccgcgccaaaattgcgcttgaagaatataatgatacaccgcttgagatcacgaacggtttagagtccgttctagtcggagccgtagatgtcgggattgcgctgggtacggcaacagctgcggctgaatcaatgggactcggcactgtgccgatcggcgccgtgcgcggcaagccggacgaactcattgaattgctgaaacttccgaaatacgttttcccggtttccggtctcgtcatcggccatccggcagaccgctccgcgaaaaaaccgcgtctgccgcaagcagccgttctgcatcatgaaacgtatcaagaagaagatttaagaacccatatcgaggcctatgacaagcagatgtccgaatacatgaaaaaacgcaccgacggacaggaaacaagaaactggtcacaaggcatcacttcctactataagcaggtttattatcctcacattcgtgaaatgcttgaaaaacaaggatttaagacggataaataaacgtatcagcctgccggaacactccggcaggttttttctgttcctcaaacaaaagcgttgacactgtgtaaaaatttttgttaatattttcatcatatactcattggttttttgtgaaccgatgggttttctattgtgacgaaagaaggaatctgggcttatgaatgataagaaaacggatattctgctggcggcaaggaagcttttttccgggaaaagcttttcgtcggtttcgatgcaggcgatcgcagaggagtgcaaagtctccaaagcgtctttatataagctgtttgaatcaaaggaagacctgctcctggagctgctcgattttaaccagaaacagatggtagccgccgcttcattattgaatgaagaaacaagcctctcccctgaggaacggtttgccaaaaaactgatggctgagcttgaaggcttcaggcgcaatcagcagttttttaatatgctgatgtacggaagcccctcttccattaatgagcgggtaaaacggcatattcacagggctcgctccacttttatctgctggcatcgcgattcactgattcagacgtacggcgaagacattattccttatgtatgggagctggtgatcgtcctgcaggggctcctgagagaatgcatcacgctgattaagctggaaaaagaaccgctcgccctggagccgctcacggagtttatcatccgccatctcaatctcatcgtcgaaaacaggacaaccgaaaccgctttgcctcaggagatgattgacctttataccgcctccgcttcctcatttgagccgaaagacaaaaccgtattgctggctgaaagcctgaaggaactgaaagaagcggtctcagcccttccggaggaaaaatatgacgccgcaggattcgcttccgcggcggctatgctggagatagaagcagcggacaaacagccgcgggattttcttataaaagcgctcatcggttatttggagcaggccggaccgctgcaccagccgcttgcagccgttaaaacattgctcaaactataaagaaagaaggaatcagcttgaataagagtattgaaactgcaccatacaaacgctctgtcattgtcgggattcttttggcgggagcgttcgtcgccattttgaaccagacactgcttatcacagcgctgccgcacattatgaatgacttcaatatagacgccaacaaagcacaatggctgacaacatcgtttatgctgacgaacgggattttgattccgattaccgcatttttaatagagaaatttacgagccgcaccctcttgatttccgccatgagtattttcacggcgggcaccattgtcggcgcattcgccccgaactttccggtgctcttaacggcccggattattcaggcggccggcgccgggattatgctgccgctcatgcagacggtatttctcacgattttcccgatggaaaagcgcggccgcgccatgggtatggtcggcttggttatttcgttcgcgccggcgatcggcccgacgctttccggatgggcggtcgaagcattctcttggcggtctttgttttatattatcttcccgatcgcggtcatcgatttgcttttagcgattattctgatgaaaaacgtcacgacattacgagaaacacagattgatattttatccgtgatcttatcgaccctcggattcggcggcctgctttacggcttctcaagcgccggttcatcagggtggaccagtgctgaagtgctgacttcgctgcttgtcggagcggtcgcgctgattttctttatcgcaagacagatgaagctcaaaaaaccgatgctggaattccgcgtgttttctttcgggattttcagcctgaccaccctgctcggaacgcttgtcttcgcgctgctgatcggaacggaaaccattctcccgctttacacgcaaaaagtccggggcgtatccgcgtttgataccggattaatgcttttgccgggcgcgattgtgatgggaatgatgtctccgtttatcggccgggtgtttgacagaatcggcggaaaaggccttgcgatgaccggattcttcatcatcctgctcacgtccctgccgtttatgaatctgacaaactcgacgtctctcatttggattgtcgtcgtttataccgcgcggcttttgggaacagccatgattatgatgccggtgacgacagcgggaatcaacgccctgccgcgccacttaattccgcacggcacagccatgaacaataccgtccgtcaagtcggcggttctatcggtacggcgcttttagtttccgtgatgagcagccaggccgcacacgccaatgcgtcaactccgggaaacgccgccctgcacggtatgaatgcggcatttgtcgtagccgcctgcatcgcgctggccggcttcctcttatcttttacattaaagaaaaaaccgcgtcagcccgagcagcagcaggccgttacgcggtaaaccaaaaagaacccgatcacgtatgtgaccgggttctttttttacttctcgattccgtcttttacttctttcaccatctgagccatggattccaggccgcctcctgataaataccatgtagctgaatcaaggtagacaacatggttgtttttcacagctttcaccgattttacataatcattttcaaccacttgttttgttgaagattttgtgccgatcgctgttccgcggtcaacgacaaacatgtaatcagggtttgttttggcgatatattcataggaaatgctttgtccgtgcagtgaggcttcgatgtttttgtcagccggtttgacgccgaacacatcatgaatgaagccgtatcttgatttagatccgaacgcgctgattttgccgtcgttcgccatcaccactaacccgtttttatccgtgctgcttgtctttttcttcagatcggcaatggatttgtcaattttcgcaagcttatctttcacttcattttctttgttgaagattttgccgatcacttcggtgttttgcttgaatctgtcaacgtagtttgtatagtcatcatcaagataaatcgtcggcgcgatttttgagaactctttataagaatcagattgtctgtgggcgataatgattaaatccggatcaatatccgcgactttttcaaaatccggttcttttaaaccgccggtattggcgtatttatcactattatatgaagataagtattttggaaggttttgtttcggaagtcccgccacgtgatcctgtaaaccgagttcatccatcgtgtccagcattccgaagttgaatacgacaacttttttcggattcttcggcactttgactccttctttgttcagatcatctttgattgtgattgtttcttttgatttgcctgatgttttgtccccgtttccgcatgcagaaacaacaaaaatcgtaacgagcgcaatgaatagcaatgcgaattttttcataattttcacctcatctggtttttaagaaaagtacacaccgatccgctgactgtcaatctcttgaatcgggatggtcatatcataaatatcttcaagcacggaggtttcaatgatctcctccgccggcccttctttgacgatccgtccgtttttcagtgcgacgatatggtctgaatatacggatgcgaagttgatatcgtgaatcactacgacgaccgtttttccgaagtcttccacaagccgcttcaacagcttcatcatttcaacggaatgcttcatatctaaattgttcagcggctcatcgagaaaaatatagtccgtatcctgagcgatgatcatcgcgataaacgccctctgacactggcctccgctgagctgatcgaggtatttatcctttaaatcatccagcttcatataactgagggcctggttgatatgcacccaatcttcatccgtcagtttcccttgggaatacggaaatctgccgaagctgaccaggtctttaattgtcagtctgatattgatttggttcgtctgcttcaagatgctgattttttttgccagatcgttgcttttgcaggccccgatctcttgcccgtcgaccgtgatttccccggaatccgtcttaatcagccggctcatgatagacagcagcgtactttttcccgcgccgttcggaccgataaatgaggtgagcctgcccttttgaatggatagagacgttttctcaaggacggttttccctccgtattgtttgcttacatttttgacctctaccatgatttattctcctttaacagcagatagataaaataaatcccgccggcaaaattaatgatgacgctcagcgtcgtggaaaacgtgaacactttctccacgacgaactggcccccgacgagcgcgacgatgctgatcaggacggaacccgcgattaaatacgtgtgcctgtaggtttttaaaaactctctcgccagattgacgacaagcagtcctaaaaacataatcggcccgacaagagccgtagagacagacacaagaatggcgacgacaatgagcatctgtttcacaagcttatcgtaatcaatccccaggttgacggcgtgctccctgccgagcgacagcacgtcaaaaaaccgcgtgaaccgccagacataaatgcccgtcagaagaaagacagcaccggcaaaccataaaagatcggtgttgatattgttaaagctggcaaacattttgtcctgaacaacctggaactcattcggatcaatcagcatctgcataaaggatgacagactgttgaacagcgtgccgaacacgacgccgacaagcagaaggaaaaacacgttccgcccctcgcctttaaacatgagctggtacaaaacgagtgacaagagcaccatcagcccgacggagatgacgaaattaagatttttgttcatcatgacgatattcattgaaccgaacaggaacacgatgacggtctgaatgagcatatacagggaatcgaggcctaaaatgcccggtgtcagtatgcggttatttgtaatcgtctggaagatgaccgttgaaaacgcgatcgctcctccggtgagcatcatggcaagcactttgaagcatcgtctcggcagggagtattcccaattgcccagtccgtagaacaggaagaatccgatacatatcatggcgagcgccgccagcagcgtaatttttttattatgactcatatgcttttctccttaacagcatatacaggaagatgccgctgccgataacaccgaccatcaggccgatggaaatttcgtacgggaagatgatcacccttcccaaaatgtcgcaaaacagcacaaaaacagcgcccagcagagcggtgtgaggcaggctgctcctcaggttgtcccctttgtaaatcgacaccatattgggaatgatcaaaccaagaaacggcagcatcccgacggtcaggatcaccagtgaagcgatgagcgacacgataatcagaccgatattgacgacgcgtttgtatttcaggccgagattgacggaaaagctctctcccattcccgccaccgtaaatttatccgcatacacataagcgatgatcaccagcgggatactcagatataaaagctcataccggcctttgacgaccagtgagaaatccccctgcagccaggacgacaggttttggatcaggtcgtatttatatgcgataaacgtggcgactgaactgacgatattcccaagcattaaaccgacgagaggaataaaaatcgcatcattaaacttgatcctctcgagaattttcatgaacaggaaatttcccgccaacgcgaaaacgaaagcgatagacattttcacaagcggactggctgacgtaaaaagcattaatgaaatcaaaattccgagccttgcccagtccatcgttcccgcagtcgtcggcgatacaaatttattccggctgatctgctgcatgattaatccgcagatgctcaggctcatgccggcgatgataatgctcaccaaacgcggcagccggctgtcaaacaatgtacctgcctgttctttatttaaatgaaaaatatccagcggcgacaaatcttctacaccgataaatatagaagtacacgccaaaaccgccagtagcaaaagtaagtaacgtagcttcatgctgcctccctgcacccatcacaaacggtatgactgattgccaaacaactcccatacaccccactcgtaatgattatcattatcaacgacaattataatcttatcatctttccaagcgcagtcaatacagttttgctttcaaaagcggtcatccgcgggccgtacactaaattgtcttacaatcagtctatcaagaatttgcaggattttctataaccttcatttggctgcttatcattttttgcacatgatgacacgcttgagggaaacaaatctgacaaacagcggcaaaattcctccatgtaaatacaaatgttctccccacgtagaaaaaatccttgatttacatgtttgaaagagagataataaaaattaaatttgtgagaaaatttaaatattaggggatgtaaatcatgaaagttgtaaaattcggaggcagctctcttgcgtcaggagcccagcttgagaaagtgtttcaaatcgtgacggctgatcccgcgcggaaagccgtcgtcgtatcggcaccgggaaaacgcttctcggacgatacaaaggtgacggatctgttaatccgctgtgcggagcattatttgcaaaaaggtgcagcgcccgagcttgccgaaacggtcattgaacggtacgcagccatcgcgcgtgagctgaatctggatttctctattatagagagaatccgcagtgacctattcgctctcttaaacagctgtaaaaccaatcccgaacaatatatggatgcggtgaaagcgagcggcgaggacaacaacgcgaagctgatcgcagcctacttccgacggcagggcgtgaaagcggaatatgtaagtccgaaagaagcggggctgtatgtgacgaatgaacccggaagcgcgcaggtgctccctgagtcctatgatcatttgtaccgcctgagaaaccgtgaaggcttgatcatttttccgggatttttcggttacacgaaggagcatgagattgtgacgttttcccggagcggttctgatattaccggctccattctcgccagcggcttaaaagccgacctgtacgaaaactttactgatgtggacgccgtctattccgtcaacccgtcaatcgtgcggcatccgaaagaaattaacgaactgacgtatcgggaaatgcgtgagctctcctatgccggattttccgtttttcatgatgaagcgctgattcccgcatttcgggccggcatccccgttcagattaagaatacgaataatccggaagcgaaaggaacacgcgtcgtcagcagccgtgacaatacgaacgggccagtcatcggcatcgcaagcgacacgggcttttgcagcatttacataagcaaatatttaatgaaccgggaaatcggtttcggccgcaaagcccttcacattttggaggaagaaggattgacgtatgaacacgttccatccggcattgacgacatcacgatcatcctccggcacaatcagatggactcagaactggaacacaggctcgtcacccgtctgaagcaggaacttcaagcagatgaagtcacagtcaggcataatctggcgctgattatggtcgtcggggaagcgatgcgccataatgtcggcacaaccgccagggcatccaaagcactgtcggaagccggcgtcaacatcgagatgatcaatcaagggtcatcggaagtcagcatgatgttcggagtgaaagaagaacaggaaagacacgcggtgcgggcactgtatgacgaattttttgccggagtcttactctcataggacaccgcctcttttttctcttgtccactaatatcccttacaaagcagcttcttttacatattgtatggtatagacaatatggaggtgaagctcatgtcaggatattctggaatcagctctttcgctttgatcgttgttttatttatcctgttggttattgtaggtactgcctatgttggcggtttctaagcatcgctccgtctatatgaggacgctgcaggttttgacctgcggcgttttcttttgttttccgccgctgtccgagtccggccgcgcaaaaaaagactgccgggaacattcccatgcagtcttttcctttgttcaggctattttcttctcacgtcattcctctttcagctacatggaattcagcctgatctgtctggcctgctcctgtcactgtaaaaatcgcggcggctgctaaacaaataacaaaccatttagatttcaatttcatacaaaccctcactcctttgtatttgtttccttgcctcttcgactttcagaaaatagtcagaagaaatcttaaagcaattttgttcatagtaatatttagctgcttctagtgctaaatcctctatatcagcgtataaatttttatcttccaggtaacggaaacacgtgctgattgtttcctcatccggtttcgcctgatacagagcctgcagccattcgaattttaccgtgtaaacgggatcgtctgtttctttagcatattcatatccccgcttgtgatattccgacgctttttctttttttccgagtttaaagtaaatgagtgtgattagaaaatatgcttgaggaagagaattgacgattctttgtgattcaaatgtatcaaccgcccgttcaaagtacggaatcgcttcgccgatgcggtcctgattgtagtagcacaatccgaggttatacagcgccctcccgacaagctgcgctttttgttctttttcggccatttgcagagcgtgctgaaaatgtttggccgcctgttcaaagcgcctttcatccattaaattgacgccgaatacaaaatggcattgaatgatccggacgttatatgtgtcctgctctacgtaaatttcataagcgttttttatatgtatcaaagaaaaatacgtttgtttcatatgataataagcttcggccactttaaaataaaactccgcccgttccacatggtccgatacgaaggccagttttttctcagcttgtttataatatgtaatcgctgagataaattctcttttatcaaattcaaacatgcctttgaaaaagttgacgtaataatcgagaagccctttgaggccggcctggctgttatcaatgttatcaagaatttccgacagggtcggctggtcttctatcttcagtttttccagcggctccaagtagtccagcatcagctgatggcgaaattccatgagggaataataaagcactaagttcgaatcaggctccatatggtcaagctcttgtttgatctcggccttcaagatctccgcatccggcacgctgaatgttctgatgtatcgataccactcgttaattttctgcccgactgctgaagaaggaattaacccgctcttcattccttcaccctccccatccaagacctgtttaccagttattttatcacgtttccgtctctttccatcccgaaaaacacgcaaactttgtttcggcagagcgcaattttccaagtggagttaaaacagacggcggccagacgggaccgccggtttcaagattattcatttttcgtattcagcggaaggcggattgtaaaggtcgtgcctttccctttttcgctgtcaatatctatcgtgcccttgtgcatttcgacgagctgcctgacgatggaaaggccgagtccgtattcgccgtatgccgtattcgtccgggacacatccgccttataaaaccgctcccatatatgctcaatttcttctttggagatgccgatcccggtgtcttcgatttcaatcaccgtttctttatagccttcatacccgcgcagcgtgatgtctccgttttgcgtaaattgaatgctgtttttcgtgatgttgacgagaatctggatcagcctgtcataatcggcgaacactttgacgccgtcctccacttgaatccgcagctgattttgttttttctccgcctgctgattgagatgctctttaataatttcaaacacctcgatgagcggcagactgagcttgtccagtttgatttgctgggatctgattttttcataatccaggttttctttcacgagcctgagcatccgcttcgtttcttcgctgatcagcgagaagcatttctctttatctttttccgggatggtgttgctgttaagcccctccacaagtccgttaatggtcgtcaaaggcgttctcagctcatgggagacatcggcgataaattggcgcctccgtttttctaggcggtcaatctgctctctcgattgcttcagatttttggccatgatgttgaaatcggacgccagcatgccgatttcatcgccgccgctgttcttgagcgaaatatcgtaatcaccggatgccacttttccggtcgcatccctcaatgtctgaatccgcttgacgtgaaatttagataaaagccagctcagcagaatcgtgatgataagggtgctgatgatcgcgtaaatcatatagcggttgacctggctgatcatctgctcgacccctctgacgggagacacgagcagcaccgcgcctttaaattgatcgttgataaaaagcggttttgcgacaagcgatacttccaagccttccgtattaaaacggttcatctccgctctgatctgaacggttttcccttgcttcagcatgtgccactctttacttttcagcttctcgcgcggcggcatatcgtcaggaaaaaagtaaggccgctgatgttcatcaaaaataataaacctggtctcgcgcgtttttaacatgtcctgatacggatacaggcggcgcagatcaagatcacggccgttcagctcacttgtgatctgctgcgcgtaagaagacagctcatccactttattttgatacgcaaaatctttcacaaagtgcgaaaacagggaaatgatgatgaaaaaggccaaaatcaaaatgctgacatggcttaacagcagctgatataagtatttaatcctcatcaaatttgtatcctaccccccacaccgtgtataaaaacggtttttcctcactggacagttttttgcgcagccgtttaatatgaacatcaaccgtacgttcatcgccgtaaaattgatagccccacacctgctcaagcagctgctctctcgaaaagacctggcgcggattttgtgcgagataaaagagcagatcgaattccttcggcgtcagattctcgacaggttttccgtgcagaaacacttcccgcgtcttcttattgattgaaaaacacgccgtttcgatcaattcgtcactttttacggcctgccccgtcgcccggtatcttctgatcaccgctttaatccgcgctactagtgtcagcgggctgaacggcttggtgacataatcgtcggcccccatttcaaacccgatcacctgatcggactccgtgtcctttgcggtcagcataataatcggcacactgctcgtctctcttattttccggcagatcgtcactccgtccatggatggaagcataatgtccagaatgaccaaatcccagtcctcttccgtgaaccgctgatagccttccactccgtcatggacaaattcggcttcaaacccttctttaaaaaagaacatttccgtcatggtgcatacgcttatattgtcttctatcattaatatcttcattggttcctccgcttatcttgacgctttttcttataatagcaccattttactcggatgttttcgggtttcacaattgttagtttttatttcatcacccggaaatagtttgttcatatttttttcatacatttctcctactatatacatatcggatgaccggtgctaaagaaggccggttttacaagatctgacacccacacggaggaacagacatgaactttataaaaagagccttttggagcatgaaggaaaaaaagggaaaaacatttttgcagctggttgtgttttcagtgatttgcatttttgtcctgtccggtcttacgatccagtcagcggcaaagaaatcaagcgaactggcaaggcagcagctcggcgggagcgtcacactccaggctgaccgccaaaagcaaatggcgcagcagcaaaaagacggtgaaaagaggacgtttgaatcaacgccgatttccgtctcagatgccaagaagcttacatctttacagcatgttaaaaattacaacttcctcacgacagcgtcagcaaatgcagaaagctttgatgcgataaaaagctcaggcgaatcagccgataacagttccggcgccggccgttttcaaggcggcggaagacagatgatttcagcggatatctcgatccaaggcgtgctctctacagcattgcttgatgatttcacaggcgggagttcaaaaatcactgacggacgcgccatcacaaaaacagatgcggacgcaaaagtcgccgtgattaatgaaacgctggcagatcaaaataagctgaaagtcggcggctccattaccgtttcctcagcagcggatgattctgtgaaaacgaagcttaaaattgtgggaatctataaaacaacatcatcaggagacgatcaggcacagcatttttcattcttaaatcctgacaataaaatctatacgccttacaccgccgcggcggcgttaaaagggtctgattacaaaaacaaaatcagctcagccgtttattatatggatgatgcaaaatatattgactcattcgttgcggctgcgaaaaaaacatccatagatgataaaacctacacgctgatgacaaatgatcaggtgtatcagcaaatggccggtccgattgaaaatgtcgcgtcattttctaaaaacgtcgtatgccttgtatccatcgcgggcgcggtcattctcgggttgatcgtgatgatgtcgatcagggaacgcaagtatgaaatgggtgtcttgatggcgatcggcgaaaagcgctggaagctcatcggacaattcttaacggaaattctggttgtcgcccttattgccatcgggatcgcatccgtcacgggcagccttgtggcgaatcagctcggaaatcagcttctttcccagcaggtcagctcagccgatgattcacagcagcaaacaagcggctggggcggaggagaaatgccgcggggaggcggcttgttcggtcagcattcatccggcgcggatgtcatcagtacaatgcaggtaaacgtctcgctgaatgaccttctgattcttggcgggatcggcgtcgcaattgccgtcatcgccacattactgccgtctgtatcagtcatgcggcttcaccctaaaacgatcctgaccaagcaggaataagaggaggcagcataatgagcctattaacctttcaacagaccggctactggtaccaagacaaatcacagccgctgtttcaggatataacgattagctttgaaaaagggaagttttatacaattgtcggcgtctccgggacagggaaaacaacgtttctgtctctggcgggcggacttgatacacctaaagagggaagcatcctttataacggagaagacatctccaaaatcggattaaccaaattcagaaatcaatatgtctctatcgtctttcaatcttatcatctgatcccgtatatgacggcgctccagaatgtcacaacggcgatggagatcaccggctctaaggagaacaacaaagatgcgttcgcgctcagcatgctgaaaaaagtcggcatcactgaacagcaggcccgtcagcgggtgctgacattaagcggcggacagcagcagcgcgtttcaattgcgcgggctttctgctgtgacacggatttgatttgcgcggacgagccgacgggaaatctcgacgaggatacgtcaaaggaaatcgtccggctctttcaggatctggcgcataaaggcggcaaatgcgtcatcatggtgacgcacgacgaacaaattgccaaagtgtctgatatcaacatccgcttatcaagaggaagtttcacggtcaaagaaaacagcacggctgtttcctgaaaccgcgcccctgccagcgcacacaggggcgcaccctatatccccctattcaatagaagtgaacgtaaaaagagcgagggctgcatcccctcgctctttttatttaaatcagctgtaaataacggtcaatatttgattgtccggctgctttgatcaattcttccgccttttcctcttcccccggcaaagcgagccggagtttgtcttcaatgtctttttcagaaaggccgtttcccggcgctcccttcggacagtcgatacgtgtttcatagacatgaccgccggaagccgtaacccgtacaattgtaaaacggcccttcggaacggcgttgtcagccggctgaatttgatcatcgcagctgcggtgaatccgctcaaatcctttttgaaaggattcaggaatcggctcggatgtaaaatgttcaactgaaaaatccttaccgtgcaaagctaaggtgatcacatattccacgctgaatcttcccgcttcgcctgttttcggacgccgttctgtcaatgcggcgtccccgcccggcggataaatcacgtcgatccgttccgtttggccgaaagtgagaccatgttcggccttcagcttgagaatggcgtccgccgcatgatgagccgccgagcaaaacggataaaccttaaaccaaagtcccgggctcacaatccgccaagggtttccccacccgtttacaagcagggtttctgcccgttcaagatcgccgtacagtccgaaaaaacctttctccccgtcgagcgcatgaactgagccgccgaaaccggcctttgcaagctttacggcgaacaatccggcttgagcggccagtccggcgtggagcggcttcatttctgtcccgaattgcactctcatgcctccggaacgggcggccgcaaacccgattgctttctgcaattggatttgattcagattctccgcgaatccgacggcgcatgcggccgcaatggcacctaacgttcctgtattgtgccagcctttctcgtaatgatgccttccagctgactcgccgatccgcgccatcacttcgattcccgtcacataagcaccgagaaagcggcccttgtctatacggccggctgatgcggctgcaatcaaagccgggaggatgactgcgctcggatgtcctcttacatcagaatgaacatcgtcaaaatcaagcgcatgtgcgatgaatccgttaatgagcgcggattgggacggcgtggttttttgatttctgccgataagcggcgctatcggcatcccgccttcttcttcggccagttttaccagcttttcaactcctttatcccgtctccccgcaaaagctgccgctgtaaaatcaagcagtcctttgcgcgcttctttcatcgcttcagcggatgtttccggcacagacgacatgacggcctgagcaagcccggccgtcagattttctgtattcattccgtctgctccaatacattgacggcaagccgggcgaaaaactcagccgctgccgggagcgctttttcgtcgagtgtgaaggcgggatggtgccattcttccgttccgtttgttcccatccagacgaagaagccggggattttttcttgatataacgcgaagtcttcgccgccgggcgactgttctgcccgaacggtctgaagcccaagatcttcagccgtttgttccgccgcctgtatgaaacgggcgtcgttcatcactgacggaaggtaaggataccagcggaattcggcttctgccccgaccccggctgcgattccttcggcaacccgcttcatatgtttcggaacagcgtcacgcgcttctttttgaaacgtccggacggtgccttccatttcaacatggtccgggatgacattccaagagctgccgccttgaactcttgtgatgctgacgacggcattgtgaagcgagctgatatttctgctgacaactgattgcaggccgccgataatctgccctgccgcctgaatcggatcaatgctgttatcagggattccggcgtggccgccttttcctttaacggtgatttcaaagcggtcgacactcgccatcagcgggccttctttcagaccgaccgtgccgacggggaggtcaggtttgttatgcatgccgaatatcgccgatacaccgtcaagcgcgccggcttcaatgacctgtcttgctccggcggcgatttcttccgcgggctgaaaaataaaccgcaccgttcctttcagctcatgctttctctcatttaataaaaaagccgtgccgaggatagatgccgtatggaaatcatggccgcaggcgtgcatcacgccgctgttgcgcgaagcaaacggaaggtttgtgttctcttcgatcggcaatgcgtcgatgtctgctctgacggcgatgacggggccgcttttgtctcctttgatttcagcaatcactccggtttgaagtttcggcacatcaagaaccgtgattccttcttcctccagccagcggcggattttattcgtcgtttcgaattcctcgcctgacagctcagggtgttcatgaaggtcgcggcggatattgattaaacgtttgtttaatgattcatacgtttcatttgccatttcttcttcttcccttcttagacaagttcggcgggctctcccacttgcttaatgaattttttcgtccgttcgttctgcggattgtcaaacagctcttccggcgttccctgttcgatgatgcgtccgtccgccataaatatgaccttatcggccacttcacgcgcaaacgccatctcatgcgtgacgatgatcatggttgtctgtttttcggcaattgatttgatgacttggagcaccccggctacaagctcagggtcaagggccgaagtcggttcatccagtaaaatcgcgtgaggatcaacggccaaggcgcgcgcaatcccgatccgctgctgctgcccgcccgacatcgtaatcgggtagctgtccgctttgtgttctaaaccgacttgccgcagcagatccataccgatctgttccgcttcttttttcggtttcttttgcgcggtgatcagcgcctctgtcacattttgcagggcggttttgtttttgaacaggttgtaattctgaaacaccatcgccgtctgctggcgaagcttatgaacgtctttgcgcgaataggacactgcattcagttttgcatcaccgatttcaatgatgccgtcatccgggcgctccagcagattcaaacaacggaggagcgttgattttcccgagcctgacgggccgatgatggccgtgacttcgccgcttttgatctcaaggtcgatcccgtcaagtacggtaaggtctttaaatgcttttcgaatatgtctgacttgtatcatcctgagcctcctcctatgtgcgataaggcttgctgatcgcccgttcgagcagatcctgcagcacactgtaaataatcgtaagaatccagtacatgaccgcgacggctaaatacgtctcaaaatatttgaggttgcctgatgcgtacatttttccttgggcgaacatttccatcactcctaatgtaaaggcgagcgatgtttcctttaacaggccgataaacgtatttcccgtcgcgggaagcgcgtttctgacggcttgcgggaaaatgatccgtctgtacgcctgggattttgtcattccgacagacagacaggcttcaagctgcccctcatcgactgagttgagcgccgcgcggaagatttcagccaagtaggcggcattcttcaggcttaacccgataatcgccgcagttaacgccgtcatcttgctcattccgggaaagagctggggcaggccgtaataaattaagaaaagctgcacgagcgtcggcacgccccgaaaaaatgaaatatacacctttgacagctggtgaagcacaggaacacgattttttgtgataagcgctaatataaggccgccgatcacggcaaataccatggccgcgacggccattagtaatgtgatcggcaaggcttcgattaacgcgggaaaagctgaaaacataaatccccaatcaatgctgttcattctcgattttcaccgccgtttcttaatgctttgcttccgttgtgatgtcttctttaaaatacttttcagacagctttttcagcgtgccttcttttcgcaggtcttcaatggctttgtttacttttttgcggattttatcgtgagccgcatctttcgcaaacgggaaagcgactttttcatagacaatcgggtctcctgctaatttcagaggcagaccggtctttttgatctgggcgatcaggacgctgcggctgtttacataagcgtcaacccgtccgtaagccacgtctttcagcgtgccttcttgtgtttcatacgttttaatgttgatttttttatccgggtccttgctctcaaggtttttcgcgtggtttgagcccagaacggccgccactgtttttccttttagatcgttgactgatttgatgtctttgttatcgtttttgacgacgatttgagtgcccgcatacgaatacggttctgtgaagttatacgttttcttgcgttcgtccgtgacagcgacctggttagagatggtgtcgagtttgccggtctggagctctcccatcagaccgctgaattcaagcagcttccagtccagtttcatgttgatctttttcgcgacggcttccatgacatccacgtcaaagccggtcagcttgccgttttctttatatgcgaacggatagctttgtcccgtggcgccgacatgcagtacgttatcgccgccttcgctttcttttccgtttccgcatgctgataaaaccgccaaaagcgcggcagacagcagcaaagcccatgttttcttcttcattgaaatcccgccttttcctattaaaatgttaatcctgcaattgtttttttaaatagatggtgatgtgcccttttcctaaatccttttcgcctgcacggacgtagcctttccgctcgtacatgccgatcagccacggatgcttgtccgctgtgcccagtgacacgaaaggcgcttttaatgtatcgcggagcactgtattctccagccattccagcatgtccgagcccgtccctttttttccggtttcaggatcgacggcgaaccaccaaatatgagggacaccgtacggcccgggattcggtccccacggcatccgcagagaaatcgtcgctagaatccttccatcttcctccaaaacgtaacaggcgtttttttgtatgttattcaaaacgagctccttatccgccgtggcagcggcaaagttgatgccgagcttgcggatcggttcatacgcgcgcagtgtcagtgaaagcagctcatcagcgtctgcctccgttgcgagccggtattgtcttgacatgatgagccctcctttagtcggcatatcggtttgccggtttttccagtccgaaatgttctctgagcgtcgttccttcatattcttttctgaacacgccccgttcttgtaaaatcggaatcactttgtctacaaaaagagtgagaccttcaggcaaaagcggcggcatgatgttgaaaccgtcacaagcttgttttccgacccattcttccatcttatcggcaagctgttctggcgttccgacaaagatatgatggcctcttgaacccgctacatatttgtacagctcgcggatggtcatgttatcgcgtttggccatctcctgaacgagcttgaaccggcttttaacggcatccgacgcatccgcatccaattcaggcagcgggccgtcaagcggataagcggaaagatcaacgccgcccagatagttttgcagaatgttcaggccgacagacgggatgatgaggtcttggagctcttcatattttgcctgcgcttcttcttcggtatcggcaataacgggaaaaattcccggcatgatcgcgattttttcaggatcacggccgaaagaagccgcttgttctttaatagattgatagaattcctgcgcggactccaaatgattttgcgcggtgaaaatgacctccgccgttttggcggccagcgcttttccgtctcctgatgatccggcctgaataatgaccgggcgcccttgaggtgtacgggcgacatttaacggccctctcacggagaaatatgttcctttatggttcaattcatgcattttgtctttatcgaaaaatgctcctgattctttgtcacggataaaggcgtcttcctcccacgaatcccataatcctttgacgacttcaacgaattcttccgcgcgctgatatctgagatggtgctcaagatgcttttcgccgctgaaattaagcgcggtcgattcaatcgaagatgtgacgacattccagcccgcgcggccgttggaaagatgatcaagcgatgcaaattgtctcgcgatatggaacggttcgctgtatgtggtagatgcggtcgccgtcaaaccgatgcgggatgtgacctgagcgagcgccgacagcagcgtaaacggctcaaagcgcgtcagcacattcggatgtgatttgccgtctattgataaactgtccgccaaaaacagcatgtccaatttcccccgctcagccgtttttgccagttctttgaaataatccaaattcatgctcgcgtccgccggtgcctgaggatgtctccaagaagcgacatgatggccggtgcccgcgagaaacacaccgagtttgatttcttttttctttgtcatgatggatctccttctattctgaaatacggttcggaaaacattaacactactaaacctatatttcctagtaattttataagaataaatcaaaatgtacaattgtcaggcaagtttgtcaatgcatgaagacaaaaatcatgatttttaaaaaaaccggcgcaccggccgggttatttcttcgaaacggtatagacggtccctttgacctttttcttaataacggcaatgataagcagcaaaacggggaacagcacttgaaacggaagatgaatatagatcggcacaatgtttaagccttcattcatgtgttccgaaaaattgcttgcgatgctgatggagagaatcagcacccccaatccgaccggaaaggccagctgggacggatttttttctttaaacagcgtggacacgcccacgacaaccgcatatgtaaaaaggctgactttgaaaaaaccgccgatgacgagcacgagcatgaagaagacatccagccggtctaaaaactcttccactttaattgtctgtatggtgctcagcagcggaaattgagagcggagcattaagttgacgtccagcacacaaatattaatcgccactgacattgccaaaaacagcccgctgatgataatcgccataaatccggttttcttcacctttttccgatcttttaaataagggaaaatcatgacaaacacgattaattcaccgaacgggatgaacatcgtctgtttaaacacggaataaatgaccgttcctgcaccctccgctaaaacgggctggagaaatctgaggtttatcgtgcctgagctgataatgaggatcagcccgacggctgtcaggaaatacataatgccaaacagcagctcgccggctctcgctatcacttcaattccctttctgaccgcaaatatcgcggcgatcatcagcatggcattcacaattaaaatcggcgtgtcctgataggcgaaggtgacaagcatttcgccaaaatcccgcaatacgcgggcggcgatataagcaaaatagagaatataaagaagggagaccgcccagctcagatgtctgccgatcagttcgttcatgtaatctctcggagaagactcaggaaaaaattgatacagcgcctgataaacgtagaaaagtccgagaccgataacgcacccgagaagcacggacagccacgcatcccgcccggccatcgtgcccggcgggatcaataacgaactgcccaattcaaacaaaatgatcataataaacagctgacgcgtgccgattttcgcattttccatacgcttcgctcctttctcctcaaatcaatcatgctcaagcttgtctgagagaggattattccgcaagcccgttcttctgataatgacttccgttttgacatctacggggagatttgggaaatattcttcatcccacttccctttgaactttttccatttgtccggatgcttccgatagatcaggtctccgaagccgacgaagtcattcttatgggcttttatatcttcaatcgatttggtgatatctttctcaagctgtacgctgagcgccttttgcatcgtcatcagcacttgcggatcagacagatggaaagggtatctgacagcgtccaccagcccctcgacctgagcatgcacgtgaatatgcggttttccgttcggaaaagtggccgtcacctttgtattctggcgggtgacctgcagactgattgcgtgcttcacgttcttccaatccgcattgatgaacgtatgcttgatcctattgagaagccatacagcccccacactgtcgtcatcctcaatccagtaatccagcctcccatcctttttgaacaccgccagtccgtccgctgacagcactgctttcggttcagttgtctgcgtattttccatcgtaggaccggctttatcgtctccgtgcatttcataaccaggaataaacggcgacccggtcggagaagcgagatcaatcagaacgtcctgaaggctggttttaatgactctgccgtattgttcctgcgtgaagctgagcgtcttgttcactttattggaagggattttatcaatcggcgtcagcactttaataatgtcttcagccttgcaattatgcgcgatcacaacggttgcggtcgtcctgaattcggtgtcgcggtcaagattgtccagaataaaactgagcccttcctctttcgccagtttttcactgaacaccacgagattcgtatgcgcaaaatagagccttctggacactttcatcgagccttttctcaaagcttccgtcaaattgtctccggacaccgaatagacggaaaccggaggccggtctcccgctccgccgccctgcagaccgccggccacgtttcccggattgataatttgaaagtgaaggacgtattttcccgtttcggtccggtcaataccgatggcggagatcaccgctaaatcggtcagctcccttttatcccagcatccggatacaaacataagggaaaccatcgtacaaaggataagcatccatttacgtcttttcattaccgtcgccctcttctacatctttattaaccattcctctggatgtctccggtttcggtctttgatgttccccttggcgcctgttgttttcctgcacgagcagtcccggccttttttcatccgcccataacggagcgcggaggagggaatccttcagtccgcccggggttaaaggagcgagcggggacatatacggaaatccgaatgaacgcaggccgcacagatgaacaaacatcatgataatgcccagaatcagcccgtaaaatcccatgaccgccgccgagagaataaagagaaaccggatcagccgcgcagatatcgccatgtcaaatgccggggtcgcaaagctggcaatcgccgtcagggcgacgacgataaccatggccggggaaacaatgccggcctgtacggcggcctggccgatgacaagcgctccgactatggaaacggcggagccgacaactctcggaagccggacacccgcctcccttagaatctcaaaggccacttccatcgtcagcgcttcaatcacggccgggaacggcaccgtctcccgctgggccgcgatgacaatcagcagctgcgtcggaatcatttcctggtgaaaggtcgtcgccgccacataaatccccggcgccaccagtgaaatgaagaagatcaaaacccgcagcaccctgatgctggtggcgatatcaaatcgtgaataataatcctcaaccgattgaaaaaattgaataaataaggccggcgcgaggagaacgaacggcgttccgtccacgataatcgcaaatcgtccttccagcagattccccgccacgacgtccggccgctccgtatgatatacggtgggaaacacagaaaacggcgcgtcttcaatgagctgttcaatgtagccggattccagaatgctgtcgatgtcaatgtgcttcagccgcttgcggacttccttaatcagctttttatcgcaaattccgttaatatacatcagcgcgacatccgtattcgtttcgtgtccgatctccattttttcaacccatacatcaggcgtttttacatacctgcggatcatggaaatattggtttgcagagattcagtgaatccctgccgcgggccgcggaaagagacctgggtgctcggctcttgaatggaccggtgctctcccccttccgtgctggcgatcagcgccttgtcagccccgtcgacaaaaatgagcgtgctgcccgccaccagcccggcataaagacttttccatttttcttcctctttcaccccgccgatcgcaagcgttttatcgtatatcaggcagaccgcttgttccggctgaacggacgggatgtcgattaaatcctccagaagggattggctgacgagctgttcgtctaccaaaccggcgatatacacaattgcggccggaagctcttcttttccgattttcagccggcggatgacgacatcggcactgttgccgaacctctcagacagcttcttcatattttcttttaagctgagggagatcggctcatcccgctctttgtccggctggctggccgcttcttttctgtcttcattgtcacggtcgttttgatcggcttttttttgtttcttctgcttaaaaaatggcggcatatcgcaaaaaacctttcctcgtttttttcatattcttcctgtacggcaaaagattatgcacggcggaaagtctgtataagttttgcgtaatcgaaaaggataaaaagggagagtgttgctcatgaaaatattgggagtttcattttttttgctggctgccttgctggtgatttcactcgcgatggatatgctgcaaggtttcagtttctatggagcggtccaaaacaacctgtccgcttttaaattgaccaccttctcagaatggctgatgctgtttttattcgtcctctttttaatcagagaaatgatcgctttatataaatcaggtaaaaaagatgcctgacaggcgcacggctgtattgtgtcaaaaaagaacacatccctccttctctcggagttcatgtgttctttttatttttcgatgcagattgttttcagatgacgatatttccgctttccgtatctgtcgtgtgtttcacaatgacgcctctgattatgcggttgccgaggattttggtgcttgcggaggaattggtttggatggcggaagcagaagcggcggaaaggttgttgatggtattgcccgacacgagggaattggaggctccgttcagatagatgccgatcgggctgcccgccgttcggttgatcgtgagcgtattgtctatgacttcatgcgtgcctgagttcagatacacggtaacgatgagcggtgatgattcaaagcggttgctgatgacagaggttcccgaggatgttgaactgaatacgggatagtttttatagttcttaaagagattgcctttgatgacagccctggcgtcatttgttacagatacggcataggactccgcggcgccctgatacgcattcggaatgagcgtatttccttcaataacggcatttccgcctgtgacccatatgccccggctgaacgatttcagcacattttgttttacggtgatattgccggccgacatgctgattccgtctgtcacctgattcagagtgttattcgtaaaaacgacgttttccgacagcgtcgcccgcatccccgtgcttcgtctcgtgtcggaacgtccgttttcaatgacattgccgtcaacggtcacatcttctgcctgatagacggagatgcccgtattttcaaattgattgattttgttgtgggtgacgaggacgctttttccccttacatctattccggtggaaaacccggtaatcagattgttggaaatgacggcattgctgctgtcctgtccttgtgacacaccttgtccggcgactgcggtccttgagccgccgtctgaccgaaagaagacattccccgaaatgacggtatgtgccccatacccgtagctgatcgtgttatcggaatgatttccttcaattaacacattatatccgttgaagttggtgactgagcttgcggcgtttccggaaaagaagttgttgcggaccgtaatatgaagagcttcttcataatcaatatcgccttctccgtacgattcaatatcgattccgaatttcggagccgttccgttcccttgcccggcgtcttcaatcacgcattcttccaccgtaacggtatggcagccggtgattgaaatgttgttccgccttgactgcctgatctcacagcggcggatggtcacctgttctgaagtttcgtaatcactgtttgtttttaacccgagcgggctgacaattatgccgtctcccgtaaaatccgaaatcttcacattttcgatcagcacattgctgctgccttcaatacagattccaaacccccattcatgggtcgaccgcaaagggacattggtatacgtgtgttcatcccgttccccgatgatccggccgccggtgatggtgacattttcacgcctgcctatatagaaagccgagtagccccaggagctgttcggcgccactttaatcgtgcattccggatctaaaacgatggtgagatggctcggcacgttaatcccggcgttccgaaacggctggcttctgtccccgccaagcgtgccgttgattttatacgttccgggcggaaaaaacaccgtatgacagccttcgcttacggccctggccaagcattgattgatggcgcccgtcacgtcggtttttccgtctgccgccacaccgcaatccgtaatatccaatatacgattcggcaagtaataatctcctccttcctctcttattgtcatcttattccgctctatcccgctccgcctgtacatactttaaattttattaaaaaagtttataaagatagtttcgtcagataatataacaaaacaagtcattggaattaggaagattcgtctatattcaacgttttaatatcttttcattctggaattttttgaattcagtataaattatattgacacaagtattatataagaatatgatttttgtaatacacttttttaagaaagggttggctcaggtggcatctattgataaggactctataacagaaactgtgccgcaaagaggctttttcggtcatccccgcggcttgtttacactgtttttcaccgaattttgggagcgtttctcctactatggtatgagagccatattgctttactatttatacacggaagtcgctcatggcggtctcggctttgataaaacgaccgcagttgccatcatgtccatatacgggtctctcgtatacatgtcgagcgtcatcggcggatggctggccgaccgggtattcggcacggcaaacaccgtattttacggcggaattttaattatgttcgggcacatcgctcttgccttccctggcagcacggcggcgttttttaccagcatggctctgatcattatcggaaccggcctgcttaaaccaaacgtatccagcgttgtcggagatttatatacgaaggaagacgagcgccgcgactcaggtttcagcatcttttacatggggatcaacctcggcggattgcttgcgccgctaattgtcggaacactcggacagaagtacaactaccacttaggcttcggatgcgccgcggccggtatgttcctcggactgattgttttcgctcttacgagaaagaaatacctcggcaaagcaggctccaatgtaccgaatccgatttctaaatcatcagtgatcggcacgggaatcggagtggtcatcgcagcagccgttattattgttctgattcaaaccggctggctgacgatccagcgtgtgattgacaccgtcagtatcctcggcattgtcattccggttatttactttatcgtgatgttcacaagcaaaaaagcgacgaaaacggaaaaatcacggcttgcggcttatgttccgctgtttattgcagccgcaatgttctgggcgattcaggagcagggcgcgacgattcttgctttatatgcggatcagcgcacgagactttcctttgcgggcatgcatcttgagtcttcatggttccagtctctgaacccgttattcatcgttattttcgcgccggtgttcgcgtggatctggatgaagctcggcaaacgccagccttcaacaccgattaaattcgcgatcggcattatccttgccggattatcatttttagtcatggtgcttccggttatgggcggaagcggcgagcttgtgagcccgctttggcttgtgctcagcttccttttggttgtgcttggtgagctttgcctttcaccggtcggtttatccgtcacaacgaaacttgcgcctgccgctttctcagcgcagacgatgagcatgtggtttttaacaaacgcctgcggtcaagccttgaacgcaaaagtagtcggtttgtttgataagatttctgaagcggcctacttcggctcaatcggtcttatttcgatcattctcggtattattttgattcttctatctcccgttattaaacgggcgatgaaaggcgtacaataaaagaaaagcctgcggaatcgtccgcaggctttttttatgcgtctatcgttttaactcctcaagtgtttctctccatctcttcaagacatcttccggttcgtggagctggatggccggtccggatgtcagatccgcgtatttcgcccgatcttccttgacggtgatcacgcggcagctgaaccgttcccgctcgtgttttgcctctttcagcggcggaagcgcctcacattccaatgtgacgtaatatgcggctcctccgtgccaggcgatgaaaagagcttgtcccgaatgcaacaggctttttacggtcgtcgtgtttttccataaggcgagccggagatttgttctgctcacagccacgatttcaccggcgctgatcatagccgcgtgcggacggccttcttttgtcacagattgcagcacaaacgcgtcgtgctgctttttttcaagctccgtcccatctaaaagtctgtaaagcgcctccggcaagtgctccgtcagcattacgcttttctttccgggacagcgggaacatgtgcggccgtctccgtttctttcggatcaattttaaatgccgggttgaatgccgccggattcgtgatgctttccggttcacaggatctccatgtgaaaaagcaggtttggcattggtatatttcccaagcgcctttgaccggcgattggctgacggtttctccttttttcgattcacagcgcgggcatgttttcattgcaacctcatcctttcttattgattcattaagtccatcagtttttgttcccactctttcgttgtcagcggagaatcaagcggctgcgaataatggcctcttgtttccggcgcgacaggcgttgtggcgtcaagaatcattttgtgtgtcatccctgccggatcagaccccgggtcaagcggaaggacggacagatcaggaatgatgactgcatcgtgtttcggatgcattttcgttgagagcgcccacatgacttgcggcaggttaaacggatcgacatcttcatccacgacaatgaccattttgcagtagccgagtccgtgcggcgtggtcagggcgcgcatgccgaccgccttggcaaatccgccgtagcgcgttttcgtggaaataatggcgatcagcccgtgcgtatacatcgcattcacggcgacaatttcgttcggataagcttccttgagctgctggtaaagcggcacgcacgtattaatgccgatcatataatcgcactccgtccacggcatgcctaagtataaatgttcaaaaatcggattgtttctatgatatacccgtttgattttgatcaccggcatgctgcggccgcctgaataatggcccgtgaactcaccgaaaggtccttcgtattctcgttttcccgcaaggatctctccttccagaacgacttcagcgccccaagggatgtctaaatcagacaatttagatttgacgattctgtagggctccccttgaatcgcgccggccatttcatactcggattgatcgtataacagcggagttgacgcagccgtcgtaatcaccggctcacagccaagcgctatcgtaacgggaagattcacgccgcgttcttcagcttggcgaagatgaatcgcaatatcatgctgaggcacgggctgaatgccgaggcggtcttttccctttacctgcattctgtaaatgccgacattctgcttgccgaaattgtccggatcttcaagatcgcgggaaatgacacacgctttatccaaatagtagccgccgtccccctggttgattctgaatagcggaaggatgtcaaatagattgatatcttccgttatttcattttcatgaaacggcgcggtttcttcccgtttgaccggcaccggaaatgcatcgtaccgtttggcaaactcaaagaattgttcttttacaggcgtatctttcggcatgccgagcatcatcgcgtgattcggccacgagccgatgacattcagagccacctgcgcatggtgatgtccgtaaatattgttaaacaaaagcgcaggggttttatccccgagattgctggctgcacgcgctgcggcgcccagatccggctccggttttacttcttcgttgactgttaagagctgcccttctttttcaagagcggcgagaaattccctaaaatcctgataggccattatcagattcctcctttttgtttttcaattccgtaccaccgtttcgcttccggcagacggatgccgaactgatcgagcgtccggaacacaatatggtcgatcaattcatccatgtcagccggcttgttataaaatgccggcatcggcggaagaatgacggaacccatttttgtaagcgctagcatattttctaaatgaatttggctgagcggcgtttctcttgtcagcagcacaagttttttccgctccttcaggatgacgtcagccgaccttgtcagcagattgtcagccattccagtgcggatgcttgccagtgatttcatgctgcacggagcgatgatcatcccgtccgtttcaaacgaaccgcttgaaatcgccgctgcctggtctttgtgagaatacgtataggatgcgagtttctcgacatcttttaacgtataatcggtttcatgtgtaatggtgacatttgcccaaggagaaacgacaagatgggtttcgatctccgcggcttttaaatattctaaaagcctgatcccgaatatggctcccgttgccccggtcattccgatgacgagcttcatattgacccctcctttacgcttgaaatgtggtgtcaaaaccatcatactcctgatatatccatatgaaaaatattcgttaaatctatgtatcataccttaaaggtataaaagaaaggagcgagcgttctcatggatatccggcaattgcgttatttcatcaccattgcccaagagcagaaaatcacgacggccgccaaaaagctccatatggcacagccgcctttaagcagacagctgaaacagctcgaagaagaattgggcgtcattctgtttgaccgcaataaaaagaaacaaatgacccttacatatgaaggaaatgtctttttgaaaagagcgaaagagattcttcataagtttgaggatgccattatcgaggtacaagagctgaaggaagaagtggccgggacacttgccgtcgggtcaaccatttactgcgcagcgctcatgcttgagaaagtgtcacagatgaaagagcggtacccgcatctcacctttaacatttgggaagatgaacccgtctcactgcttgagcttctggaaacccggcagattgacgccgccgtcaccaccaccttgattaaaaacgacggcattgaatcgaaggagcttgaagacattccgtgtgtattggtgctgtccgagcattcaaaacgaatgtgcggagaaacgattaaactgaatgacatcgcctctttgcctctgatccttttgcgcaccgtcaatggaagaggtgtgtatgaccaagtcctccaagtttgtgaacagtacggtctcgacctccaggttgtctgtgaatgccatgactccgcgacgctcttgagcctcgtatcatcagggttcggcgccacaattctgcctttgacgatgattcccgtccatatgcgctcgcatgtcaaaacggttatcatcgaagacaacccgtttgtcatgacaccggccgtcatctggaggaaagacagctacctgccgaagccggtcagacagtttttggaattattttgatcccggaacacgaagaattcccgctcatgaaaaccaattacttgactcatactaaaaaaaagttatcctttacaattgggagctattttttctcaataaaactactcagaaaagtggggaataaagaagatgaaaaaagcattattcgctttgttcatgatggtcagcatcgcaatgcttgcagcctgcggaaactcacaggacagcggatctaagtcaaaagacggcgatctttgggcttctgtcaagaaaaaaggcgtactgaccgtcggcacagaaggaacgtacgaaccgtttaccttccatgataaaaagactgacaaactgaccggatatgatgttgaagtgattcaagaagtggcgaaacgcctcggtctgaaagctgacttcaaagaaacgcaatgggacagcatgtttgccggattaaacgcgaaacggtttgacgtcgtcgccaaccaagtcggcaaaacaggccgtgagaaccaatatgatttttctgataaatacacaacgtcaaatgcagtcgtcgtgacgaaaaaagacagcacgattgcgaaagaggctgatgtcaaaggaaaaacagcggctcagtcattaacaagcaattacaataaattagcgaaagaagccggcgcgaaaattgaaggcgttgaaggcatggcgcaatcccttcagctcattcagcagggccgcgctgatctgacttacaacgataagcttgccgtactgaactacttaaaaacgtccggcaataaaaacgtgaaaatcgcgtttgaagcaggccagccgcagcagacgtatttcgcattccgaaaaggaagcggcgaacttgtgactcacgtcaacaaggcgttaaaagaaatgaaagaggacgggactctttctaaaatagcgaaaaaatggttcggcgaagatgtttctaagtaacttgccggagcccgtgattgcaacagccattccatgggatttggtgcagcagtcattctggccgattctttccgggggaatctattactcgattccccttaccattctttcctttattttcggaatgattatcgcgctgatgacggcgctcgccagaatgtcaaatatgaaaccattgagatgggtgttcagcgtatacgtatcagcggtgcgcggcactcctcttctcgttcaattgttcatcattttttatcttttcccgacatttaatattacgctggaccctttcccaagcgcagtcatcgcgttttcattaaacgtgggcgcctacgcttctgaaatcatccgggcatctatttcatccgtgccgaaagggcaatgggaagccggttatacgatcggcatgacctatcgcaagacattgttccgcgtgatcctgccgcaggcatttcgcgtgtccattccgccattatcaaatacatttatcagcctgatcaaggatacatctctcgcgtcacagattctcgtcgcggagctgttcagaaaagcgcaggaaatcggcgcgcaaaaccttgatcaaatcttggtcatctatattgaagccgcctttatttattggatcatctgcttcttgctgtcaatcgtacagcacgtgatcgaacggcgtctcgaccgttatgtggccaaataaggaggtttcgatatgctttccgtcaaaggattaaataaatcattcggacagaatgaaattttaaaaaagatagatatggagatagaaaaagggaaagtcatcgccattctggggccgtccggttcaggaaaaacgacgcttctgcgctgtctgaacgcgcttgagcttcccaatcgcggcgagctggcattctccgatttttcaatagatttctccaaaaaagtgaagcaggctgatattcttcgcctccgccgcaaatcaggcatggtctttcaggcgtatcatctgtttcctcaccgcacggcgcttgaaaacgtcatggaaggacccgttcaagtgcaaaagcgcgacaaggagcaagtcagaaaagaagcgatagagcttctggaaaaagtcggactgaaagacaaaatggatttatatccgttccagctttccggcggtcagcagcagcgtgtcggcatcgcccgcgcgcttgcgattcagcccgagctgatgctgtttgacgaaccgacgtcagcgctcgatccggagctggtcggcgaggtgctcaaagtgattaaggatctggcgaacgaaggctggacgatggtcgtcgtcacccatgaaatcaaattcgcgcaggaagtggccgatgaagtcatcttcattgacggcggcgtcattgtggaacaaggaccgccggcccacattttttccgcgccgaaagaagaacgcacgcagcggtttttaaatcgtatactgaatcctttgtaggagcgggagaagaagcgaaacactgatttcgcttcttcttttttttggcggttatgctacaatgacaattaatgaaattttatgaaagaagggacctctttgaagcgggaattcttgatgcgctggacgttttattttgccggtctgttgattttgtctttcggggtatcgttaaccattaaaggaaaagctctcggcatcagcccttgggatgcctttcattatgggctttttcagcatttcgggctttctgtcggccaatggtccatcgtggtcggcgcggtcattgtggctttaacctgcctgttcacgaggacactcccgaaaatcggcgctatcttaaacatggtgctgatgggaatgtttattgatttcttttcgtttctgcttcctgagacgcacgctttttccttagcggccgtgtgtttttctatcggattgctgctgatcgggtgcggcgtcggtatttacgtatcagcagggctcggcgcgggcccccgggactctctgatgatgctgatatctgaaaaaacgggctggaacgtgcaatgggtgcggaacggcattgagctgacgattcttgccgcagcctggatgatgggcggaccgatcggcgccggaaccattattacggctgttttgacggggctgattctgcgtttttctttgccgcagtcctctaaactgttaacatacgcgatctccgggcgggcaacgtccgttcattaaaaacaaagccgaaacggttttgtttttttattttcggacagctttcgtctgatatgataggatggttttgacaatattttcagacggaggatctggacatgaagatttacggagtatatatggaccgcccgctttctgcaggggaagaggatcggatgatggcggccgtgtccgccgaaaagcgggaaaaatgccggcgcttttaccataaggaggatgctcaccgcaccttgatcggcgacatgctgatccgcaccgctgcggcgaaggcttacggacttgatccggccgggatttcattcagcgttcaggaatacggaaagccgtacatccccgcgcttccggacatgcactttaatatttcccactccggtcgctggatcgtgtgcgccgttgattcaaaaccgatcggcattgatattgaaaaaatgaagcccggcacgattgatatcgccaaacggtttttttcgccgacggaatacagtgatctgcaagcgaaacaccccgatcagcagaccgattatttttaccacctgtggtcgatgaaagaaagctttatcaaacaggccggaaaagggctttccctgccgcttgattcattcagcgtccgcctcaaagacgacggccatgtgtccattgagcttccggacgggcatgaaccttgtttcatccgcacatatgatgcggacgaggagtataagctggccgtttgtgcggcgcatcccgatttttgtgacgagattgagatgaaaacgtatgaagagctgctgtaagcatagaaaaaggagggtgtccccctccttttttgtcagcctgatatttccgcctgtttctgcagctgcttggcttcctgataaatttcttcgaacagatccgcgatgtgttcttcttcaacacatgaaaatgcgattcgcaaatctgtttcattaatggatatcgtcccgattcctctcttttcaagcaacgacactctcaattcgccggcgtttatgtctttcagccggacacacatgaaatagcccgagttaaacgggtaaggcgtccatacgtcttcatagtgcttgttttctgcaagaacggctttcactttgtcagcccgttttttcatgatgttatatttcagcgatttttctttctcgtattccggtgactgcatcgcccgcagcataaacgtttgggacggatgcggggcgcttgaaatcgttcccctgataatcccttttgttttttcctcgagcacgcgcagcgctttttcgctttttgtgctgtacgtaataaaaccgacgcggaagccccacgcgtaattttccttcgtcgcgccgtctattttcacgcaaagcacccggtcgtgcacttgggcgagtttgctgaagatggattcctgaatggccgtttcatcgtaaaacagattgtaatacgcatcgtctacgagcacgacaatctctttgccggcctccgccgcctccaagatcacgctgacgatttctgacgcttcctcttcccccggcgtatagcctgtcggattattcgggaaattcagcacgacaatcgccttttcttcctgctttttcagcagctcggacagccccgccgcattaaaacgcccatcctgctgaaaaagcgggtacgtctcaatggatgccttgcgccggacaccgaaaatgaaattgtaatttccccaatatttatcaggcagaagcagcgtatccccttcattgacgaacaagtcggcggcgatgctcagcccatgtgttaaagcgtttgtcacgatcggcgtgctgatgtctttgccggctaatgaaggattttcgagacgcatttttttcagccattcctgtctgagcggctcttttccctgcggcggagcataatcgtagatatcatcggggttataggcggacagtgtctcttgaatatgggaaaagtgcatggactcgccttgtgaggtggcgattccgatcgtggcattatactttccggccttggctttcgcttccgccgattgtgtcagcacccctttcggataaaacaactctctgcccaaatcagaaagcatatgaagcacgtgcgggttttcttcagataatgttctgttcagctcttttgctgcatcattcatgtacgacaatcccttcaaaattatattccatcaaatcataacataaaatttttgataaatgagaaaacgcgcgggcggattttgttacaaaaaacagacagcaaatgctgtctgtcatatcctataacaattggcctgcagtgctcctgttaataatctcatagattcgttccgccactttttcagtttcacttaatatgaacatgtggccgtccgaaaactcatgaaatacgggattgtcggcccattttttccatccgtccgcatctttgatacattttttatctttccgcccgttaaaaatatggacgggtgattgaatcatgtgagaatcagacggacggaagctttcaagcgcgcggtagtcggatctgaaagaaggcaggaaaaatgacatgacctccttattctccactaactcctgcggcattccgccaagctcgataatatgggcgagaaatttttcatcatcaagatgagacacttttttcctttccacatgcggcggctgaatggctgagatgatcacggcctgcgggtaaatgccctcccgctccagcttttgcgccagcctgaaagcgaccatgcctcccatactgtggccgaacagcacaaacgggcggtcaggatggagattcaactcctgcttgtataaactgacaagctgttcaaaatcctcaacgggggacatttgatttgttccgtgtcccggcggttccgcggcaagcatctcacactcaccttgaagataggtgtggagcgggcggaatgatgcggaatagcctcctgcgaacggaaaacagataagctgcgttttttccgtggtatcgaacgatttaaagagctggaccattggcgggcttcctccttttctatcgtgaagttgtcagcttcagatgttccttccttaggaattcgagcaaatatgccgcattcctttcgagacattctccctgaagcatttctgcgtgcgtgccgcagccttttttcacacggtattcacctgtcgtggcttcctcccacgaagcgagccacggcggcatcgcaaagtccggtgctgacgttaatagatctatatccgctttgaccgtgccggtgctgacggtatgcacgaaataagaataaaacgcgtttgtttttttggcgagaccttctttgacggcttcgttattcagcgcttcattgtcccggtttaccttcatcagcgcctggacatcactttctacggtgcggccttctaagtcgctgatgccttgttttctataagaatcaaccatgatcagccgctccactttacgtccttcggcttcaagccgtttggccgtttcaaaggcgagcgtgcagcctgccgagtatccgaacatcttgaccggtccttccggctggagctgattgatcagctctgtgtagcgttcgatgcggttgtcttcctcgataaaatcaaacgcacaaattctatagccggacagctgttttgccagcggctggtacatcagcccgtaaccgagaaccggcgggaacgcaaacagtgtgtcagactgatttttattcatgatggtgagatctttcattcctttttcttcaccgtgaagcagataaccggcaatgtctgcgattgtcgtcgcttcgaataacagctgcaccggaatgtccgtaccgagctcttttttaatgcgagacgctgccgtcatcgcttttaaggaatggcctccgagcgcgaagaaatcatcatgaatcccaatctgctgtctgccgaggatgtcggaccagatgtgcgcaattgtttcttccgtcgcgtttcgaggcccgatccattctttcgccagctgagtctgatccggtttcggcagctcccgtttattgaccttcccgtttgtcgttaacggaagctcctctaagaaagtaaaggtttgcggcaccatgtaagcaggaagctgttttttcaagtgcctctttacgtcttcagctgaaagtggcgtccggttcacgaggtaggcgttgattgatgcatctccggactcatggcggtccgcaacaacgaccgcatctttcacacccgggtattcctgcagctgcttttcgatttcttcaagctcaatccgatgtccgcgtattttgacctggtcatcaatacgcccggcgtattcaattgttccatccggcagccagcgtgctaaatcccctgtgcggtaaagcgtttctcccggcttgaacggatttggaataaacgtttgcttcgtcagatcatgacggttcagatacccttttgatacacccattccgctgatgcacagttcaccgacagccccaaatggctgaagctgattttgcccgttaagaatataaacacttgcattgctgatcggctttccgatcggcaatgaggaaatggaatccgggatatcatgcacgacgtgagctgtcgcaaacaccgttccctcagtcggcccgtagcaattaatcagcttgccaggccccatgatctcaagcgcctttctgacgtgaggcacagacgcgcgctcacccccgaataacacacagcgaagccccttcagccactcctctcccgcatcggtgagaagattaaaaagtgcggttgtcgcaaacatgacattgacattctcctgccggatcagatcagtgagccgttctgtatcaagcagtgtatgttcatctgcgataatgagccgtgccgcattcagtattgatgcgtagaaatcaaaggtaaatgcgtcaaaggcgtaattggaaacagataagaacgtatctttttcagaaaatgccatgtagtctacatgcttgaccaatccttgaatattggcatgagtggtgatattgcccttcggctttccggttgtgccggacgtatacataatatacgccggatcatcgggatcaattgcggctgcaggatcgcttgcctgttcctcaaaccgtgcttgatcatcgatgatgagtgttgttcctgtatacggcagctgagccgctttttctttcatctcctgatgtgtcagcagacaggctgccgcactgtcagccagcatgtacgagattcggtcttccggcagcttcggatcaaccggcagataagccgctcccgcttttaatacgccgagaatgccgatcaccagttcaagcgagcgcttcgtgtacaacgcgacaacggagcctttgcccgcaccttgcttttgcaaacggcgcgcaagacggttcgcttcctcatctaattcacgataggaaagagtctggccggaatacgtaagcgccggcgcatcaggatttacattcaccgcttccttgaaccaatccgtcagaggcttcgcctgatgagtctgagccggcgggtttaagccggtaagcagaagctctctttccttttcatcaacaagtctgatcgtattgacaggctgatccggcttctggatgagctgctgaatagctgtgagaagctgagattttaagcgcaggataaacgcctcatcaaacacattcccgttataggcaagcttaatcagcatctcatcacctggagaagccatcaggttgagatcataattcgatttctcaaaaacgtgtacatcctccatatcaaagccgttttcactgttctcttcattttttgcatcctgaagcggataattttcaaacacaatgatatggtcaatcagctttggctgatcggcttggctttggatgtcatagagcggcacatattgatgcggctcagactgcagcgattgctcctgcagctgcttgagcaagccgttaaatgtggtatccccagacagcttcacccgcctcggaacagcattgataaacagcccgaccatatattcaacgcctttgatttctgcgggacgcccggaaacgactgtgccgaagatcaaatcgccggactgctggtagcggctgattaatacactccaaaccgcctgcagcgccgtactcaaagtggtatgctgcgattttgcaagctcggtaaatgcttttgtttccgcctccggcagtgagaagagcaactctttcggctcatagccgtccttttgtttctttctttgctccgcaaatgtcgtttgtccttcaaaatcttctaagtacccgcgccagtaatgcagtgatgcttgtttatcctgcttttcaagccacttgatatagtctttatacggtttgaccggcggcaggctgtacggcttttgttcgcgcagggcattgtataccttaaacagatcctgcacgacgatgccgaagcaccagccgtccaaaatgatgtggtggtagctccacacccattcaaagctttcttccgattttttaaaaatggctgcccgcatcggaatatcccgcgtcaaatcaaagcccttgatcttatcctgttctttgtattcattgattttggctgtttgctcgctgtccgttacatgtgtcagatcgatttcttctatctgaaactgccgttttttcaatacgacttggaccggcctttttactttttcgtgaatgaacacggtacgaaaaacatcgtaccggtccatgatcacattcatgctttcttcaaggcatttgatattcaagctgccttttactttcattgtcatttgttcgatgtaaaagctttggccgggattcaggagagtatgaaacagcattccctcctgcatcggcgacaaataatacatgtcctgaacttgatcttttttgaactggctcatctgctccgctccccccttctgtgatctgtttttgtcacgttaaattctcctcaagcatgtcaaagatgtctcccatttcatccatctcaagatcctgcgcgctgaaatcgctcggcgtaaattctttctcctctttgaccgtgcaatggcggatgatcattaagagattgtctttaaaccgctgcatctgtgtttcgacggtgcttcttccatattcttcctgattgtatgagcaggaaatgacgaagcggccgcctgtaaccatcccgctgaagctcagtgcgtataacgcctctgactcttcgctgacttgacgtcccatatcatatggagacggctcaaaccattccgttttcacttcattgtcaaactgccccaagtagttaaaactgatttcaggcgtgacgcctttttctgtttcatcggatgacagataccggagaatcccgtatcctacacctttatcaggaacgcgccgcaccgtctcttttaccgttttaataacggaagagacgccgtcttccttgctgatctgcagaatcaaaggatattgggccgtaaaccagccgaccgtccgtgaaatattgacattcggtatgatttcttcccggccgtgtccttctaagttgatgccgactttgccgttttccgtccattcaccgatcgttaagccgagcgcgctgagcagaatgtcgttgatttccgttccgtacggatgatgaacatctgtgagcagctgcgccgtttcttcctcagtcaattcacatttcacggccgccgtatgtttgacgagccgtttgttcggatcatgatctttcggcagcggctggagttcttccgcatctgcctgcgcccaataatccgcctgctttttcagctcttctgattgcgcaaatgtgttcagcgcctccgcccaatctttaaaggagtgggttttctgcgggaggacgatgctgttttgctgctgcgcctgtttataacctgaagcgaaatcctcaagcagaattctccatgaaaccccgtccacgacgagatggtgaatcgcgattaacagatgatcgccttgttctgtccggtattgctccgcttttaacagcggaccgttctccagatcaagacttccctgaagatgatcggcaagccgctgaatctggcttttcagcatatcctcgtcagttccgtacagatctacgatgtcaaagcttgccttgcattctgtggcagggaggtatgtctgaatgatgccttccctttcttcacggtaaaccatgcggagcgcatcatggtgttcaatcaatgcttgcagggttttttccaccaggtccggatcaaagccgtctttcgcgtgaagcatgacggattggttccagtggtgtttgttcgtgaagtttttctcaaagaaccaacgctggatcggcgttaactccgcttcgccttcgacaggtccctggtcggcctgcttgccttccgtccgctccacataagagacgagctcttcgatggttggatgctggaagaggtctttcatctccagcttgtagccgtgctggttcagacggctcgccatttggatgcctttgatcgagtcgccgccgagcgtgaagaaattgtcgcttacgccgatctgatcaagaccgagcacttcctgccaaatgtcggaaagcagcgtctccatctccgtttccggcgctttatatacggcgcttcccgcttcaatgtccggttccggcagggcttttttgtcaatcttgccgtttgcggtgatcggaagctcgtccatctccacccagaacgccggcaccatgtagtcaggcagcgtgtctttcagcgcggctttgagcgcttcaatatcgtcctgctgaggcgcgacataggcgcaaagcgcggtattgcccgctttgtcttccaccgccgtcaccgctgcgtcatgaacgtccgcaagctgggcgaggcggacttcgatttctgaaagctcgatccggtagccccgcactttgacctgctggtcaatacggccgatgtattcgatgccgcactgcgcgttccatttgacgaggtcgccggtccggtacatgcgctcgccgggcacgaacggatctgcggtaaaccgcttcgccgtttcttcttcacggttcaggtatccgcgcgcaagaccgcggccggccacacacaattcaccggcaatgccttccggctgcacctgatcgccgtccccgagaatataaactctcgtattggcaatcgcccgtccgatcgaaagcgatccttcctccggattgatgacgccgcttgtcgcgacgacggtgttttccgtcgggccgtagttgttgacgatcgtgtacggctgtttcaccgcccgcttcagcttgtcaccgccgacgagaagcatacggagagaggtattttccagctccataaattgttcggccagctgcgtcggcaggaaggtgatggtcacgccgttctcctcgaaatagtgatttaagcgggtgatatccagccggatcgcttcgtcaatgacgtgaagctccgcgccgatggtccatgccgggaacatttcccagatggaggcgtcaaaaccgaagcccgcgtatttggcgcttttatcatccgccgtcatggcgaatgcgtcgtgatgccagaagcacaggttcaccagcgcatggtgttcgaccatgacacccttcggctgtccggtcgttcctgacgtgtaaatcatataagcgagatgatccgccgttgtttccgtctgcgggttcgcttcatcgttttcatcaagcggcaggctcagaatggagcgtccgccgtcaagcagaatcgtttctccgttgtagctttccggcacgtccagcgcttcctgtgtgagaagaagcttggcgccgctgtcctgcagaatgtagctgatgcgctcttccgggtagtcggggtcaatcggcacaaatgccgcgcccgctttcaggacgccgagtacacccgcggccatttccaaggacggtttcgtcaaaatgccgacacgtttgtcagccgtgacgccgcagtccatgagaatgcgtgcgatgcggttcgcccttgcgttcagctcgccgtacgtccacttcgcgccgttgtatgccgcggccggccggttcgcgtggcgggcggccgtttcttcaaagagacggtgaaccgttttgtcccgcggcacagaaattgtttttcctttccatgcgttgaggagagcttgtttttcagcatcgctgatcagtgaaatctcaggcagctttctgtccgggctttctgccgcttgcttcagaatccgcaggaacccggcgctccacttttcaattgtttcttttttaaacagatcagccgcatattcaaactgaaggccgaggccttcttgatccgtaaagccgccgagtgtcagatcgaatttcgccgtgccttggttcgactcatacggagtgatgcgcaggttctccagttccagtgtttctttatccggatcttctgtcgtcatcatgacttggaacaatgggttgcgactcatgtctctcggcaggtcaagttttccgatcagatcctcaaacggataatcctgatgcgccagcgcgtcgagattggtttgtttcacctgttcgagcagcccggcgaaggtctgctctttgcgcgtttcattgcgaagcgcaagcgtattgacaaacattcccggcatttcctgaacttcggcgctcgttcttccggcggtcaccgagccgataatgatatcgcgctgccccgtgattttgctcaaaaagacatggaacgcggcgtgaagcaccatatgaagagtcgctcccgatgattccattaattcacgcaccgctttttccgtttcacgccccgctctgaaacggacggattgtcctttaaaactttggaccggcggacggggaaaatcagtcggcagattcaattcaggaagctcgccggaaaatgcggagagccaataacgctcatggtctttcatccgttcggcctgctcaggttcattctgccagacggcgaagtctttatagtgcaggttcggcgacggcagacttccccctttataaaggtgagcgagctctttgaccagcatgcttctggacacgccgtcggcaataatatgatgcatatccagcagcagcaggtgtttcttttcgttcagtctgacaagagcggctcgaatgagcggagcagcgctcagatcaaacggcttaatgaatgcctgaatgattagatttgctttctcctcgtccgctgcttcaaagatatgcaggtcaatgtcagcctgttctgcgatctgttgcatcgggcggccgttttgatcgataaaggacgtccgcaaagattcgtggcgattgatcatctgattgagcgcttcctgaagccttgaaatattgacttctccttccatcagaagaacggacggcatattatagctgattgtctcccggtcaagctggttcaggacgtacatccgtttttgggcggatgataacgggtacgcgtctgcactgtcggccggcgtgatcatccgatatccctcagataccgccgatttttcgatatatgaggcaagcaggcggacagtcggctgttcgaacagcgcttttaacggaaccgttttgtccagttcagcctgaatattggcgaggagcatcatgccttttaaagagtgcccgccgtaatcgaagaaattatcgtcgatgccgagcgtatccgtaccgagtgtctgtttccaaatgcggcacagcttttcctccaattccgtttccggcaaggctgaaactgtttgcgccgtttggctgacgcccggtttcggaagggcgtttttatcggtttttccgttggctgtgagcggaatgcggtctacttgcacgaaataagccggaagcatatgagacggcaatgtttcggaaagctgtttgcgaagctcagagcctttcagctcgctgtcggctttatagtacgcgcacagttccggcagcccgccttcgctgactgcgagaacgaccgcctcctgaatgccgtttacgcttaacagcacggtttcaacctcttttaattcaatgcggtagccccggattttcacctgatcatccgcacggccgataaattcaatcgtcccgtcaggaagcctgcggacgacatctcccgttttgtacatgaggctgtctggtgaaaaaggatttgagagaaatttctccgccgtcagctgcggacggtgaagatatcctctggcaagccccttcccggtaatataaagctcgccgcttgcgcccggaggaacgagctgcattgctccgtccaatacaagcgcgccggtattcgcgatcgggcggccgatgacgggacgctgctcatattgatcaaggcgctccatattgatccgtccggcaatggcgccgatcgtcgtttccgtcggcccgtagtgattgatgaagtcggtatgggcgtatacgtcatgaaacttgcggacatcggacgtgatgatcttttctccgccgagcaccactaaacgaagcgggctgaaacggcgttctgccgcaaaacgggctgtattgacgatcatatggaacaatgacggcgtcagtttcacatacgtaatgccgtttttctgtatatactcaccaagctgatcaggcgcggtgtacgtctctttcggcacaatgtgcagctcgccgcccgcctgaagaatagggaatatagccgtatagccgagatcaaatgcgtaagaagacagcagcacggatttgtcagcttcggtcaaaccggcttcacggctgaaccatgtgacataattgattagattgcggtgctccagctggacgcctttcggtttgcccgttgttcccgaagtataaatgatatatgcaagctggtcggcgccgggcttcgtttcaagccggtcggcgctttcgttctgccattctccgtcttccattacgaccgtttttcctttataaacggcggccgcggtcatgtttctctcattgacgaccagaagcttcgttccgctgtcttcgagagagtagcggattctctcttcaggagtctcaggatcaatcgggagaaatgccgctccggctttcatgacgccgagaatcgcggtaatcaagtcggccgaacgatccatcataatggccacgatgtcctcactgcccgttccgcaagcctgaaggtggcgggcaaaccggttcgatcgttcatcaagctcacgatatgtcagacttgttccgcccgcaaccgccgtgagatcaggcgttttttgcgcttgccgttcaaacagcgaaacaaaagtgccctcaggcagttccgcttccgtacgtttttcatcagaaaggagcgtttcccgttcaggagcggacagcaggcttgcgtcggccagctgaatatccggattttcagcgcaggctttaatcagattgacaaaatgagcgctccagcggcggatggtttcgtccgcaaataaggctttcgcgtaatcaaagctcaatccgacctcttctccgcgttcagccgcttctaaggaaagatcaaatttagcgacatgatgatgcatggagtatgaagaaatctccaaatctccgagccgcagggccgggatatccatgttctgcatattaaataacacgctgaacagcggactccggcttgtgtccctcgttaacggcagtttttcaattaattcttcaagcgggtagctttgatgctcaaaagcttgaaggctcgccgttttcacctcatccagaaattgtttgaacgtttttttgccggcaggatgcgaccggagcgcaactgtgttgacaaacatgcccggcacgtcttggagatcaggatgctgtcttcctgccgccggagacccgactatgatgtcttcctgacccgaatatttggacagcagcacttgaaaagcggctaacaagaacatgtacatcgtcgtatccgtatcagccagcagcttcttaatctgcgccgtcacctgtttatcaagcccgaagatgacgcgttccccttcaaaactgcgctcggcaggacgcgggaaatcaagcggcagatccaacaccggcagatcgcctttgaacgtatcaagccagtaggcttcgtgctgatcgagatttgctttttcacgctgccagactgaaaaatccttataatgaatctttggcagcgcaagctccgtgccttgataaagcttcgcaagatcaccgatgaaaatgcccattgagcttccgtccgtaataatgtggtgcatgtcaatcagcagaagatgccggtcttcttcaagccggatcagcttcgaacggacaagcggcgcgcggttgagggcaaacggcctgataaaggcttttgtcagctcttctgcatcttcttcccggccctcggcggtttcaagctcaaacgacacatttttatgaatggtctgcacaacttctccatctgccatgtcaaacgacgtacgcagtgtctcatgacggttgattaatgcctgcatggcctcctcaagacgctttttgtctactgatccttccagcaaaagtacagcagggacgttgtagctcgtgctggcctgtccgagctgattaaggatatacatcctgcgctgtgctgaggaaacaggataatgcttctgataaggcgcttgtcggatcggttcaaactgctgttcctcctcgctctcatgctccaaataatgcgcaagctcctgaatggtcggcttttcaaataacactttaatcggcacttctttttgaaagtgctcctggattttagcggtcatcatcatggcttttaaagaatgtccgccaatcgtgaagaaattgtcagtcacacccgcttttacaccgagaatgccttcccaaatgtccgcgagtttctgctccgcttccgttttcggcgcttcgtattctttttgaacagcttcagcctgaggctcaggcagcgcttttttatcaatctttccgttcgccgtcagcggaaactgattcatctggatgaagtgcgcgggaatcatatattccggaagtgattccgaaagcgttttgcgcaggtcttccggcgaaaggggttggtctgcggtaaagtaagcgcagatttcattttcatccgctttatttttccggatcacagccgcagattcggtcacattctccgcctggctgattttcgcttcgatttcgccgagctcgattctgaaaccgcggacctttacttggttgtcaattctgccgagaaactcgatcgtgccgtccggaagccacttcgccaagtcccccgtccggtatatcatttcatccggtctgaacggatcgcggacaaactgcttctccgttaattcaggcagattcacatagccccttgccactccgcttccgccgacgcacagctcaccgggcgcgccgatcggctggaggttgcggttttcgtccataatgtacgcagtggaatttccgatcggcttcccgatcgggaccgaaccgtcataatcctgatcaatgagaaaactcgtcgaaaacgtcgtattctcagtcggcccgtagccgttccaaagcgacagctccggtgatgcctttctcactttgctgacgatatgcggcacaagcgcatcaccgccgatgatgaggtgccggagcgtgttaaacatgccggcatccttttgggcaagctgattaaacagcggagacgtcagccacatggtcgtgatccgctgctctttcagaaattgggcgaattgtccggcgtcaagcagcgtctcttttttcaccgggtgcaatgacgctccgttcagcaatgcgccgaagacttcgaaggttccggcatcaaagctgacggctcccgtttgcgccatccggtcttcttcatgaaccggcacgtaattcgaatgtttgacgagcctgatgatatttctgtgttcaatcatgacgcctttcggtttgccggtcgatccggatgtatacatgatatacgccaagtcgttgccgctggccggaagtttcaagtctgttccgcttaccgtttcatccgcgctttcatccagcatgacaaccgggacttgcaatgtgcccgcttgttcttgatagtcctgaactgtcagcacgagccgaatcgagctgtcgtccgccataaagcggagacgatcctccggaaaagccggatcaatcggcacatatgcgccgcctgcttttaggacggcaagcattccgataacggtttccgcagaccggtcgttcataatagcggcggtccggcctttttccagtccgctcttcacaaggtgtctcgccaggcggttggccgcttcgttcacttcacggtaggtccattcgcgtcccgcttcttttatcgcgatgcttgcaggcgtccggtttgcctgttcttcaaacaaacggtgaacggcctcctcttccggaagagccgttttcgtatcattgaatacctcaacaatctgccgctcttcttcgcctgaaacaaggccgagttcccgcacgggcgcgtcaggcgttccgaccgcggctttcatcatgcgggtcagatggtgcgccgttcgttcgatggcatcatgagcgaaagccgctccattgtatttgattttgacagtccacgtttttcccggatacacgatgagattgaaatcaaagctcgtctgctcaaaagcatgttccactttaatggaaaagccgagtctttcctccatgcccccgttttccagctctttgtccagcggatagttttcaaacgcgaccaaatgatttaagaggctgccgtccagggcggagcgcttttgaatgtcatagagcggcacataatcatagcgctcggcttccacggcgtttttctgaactgccgccatcacgtccgaaaaggctgcacctttgtcaatcttgattctgacgggaatcgtattgatgaacagccccgccatcgtttctatgccgttgatttctgaaggacggcctgatacgacggtgccgaacaccacatcgtctgtatagttgtatttgctgagcaccgcaccccaaacggcctgaaacaggttaggccccgtgacttgatgccggttggcggtctgctgaatctgcgcgaccagctcttcatcccatacaaaagaatattcttcattttggtagtctttcttttctgctgccagacggcccgggagcaggctcggctgttcgaaatccgccaggcggctgctccaatattgttccgcttcctcataatcccggcctccgagccatttgatatagtcagagtaaggtttgccctggcttcccccggcgggccggccggcacgaagcgcttcatagttttgaaacaggcttttcatcaaaacgcccatactccagccgtccatgacgatatgatgattgctccagacgagatacagctccttctcactgagtctgaacaccgccgctttaaagagaatatccttcgccagatgaaagccctgctgctgcacgccgcgtttatagcgttcgatatactcagtttggcgcgcttcatctaattgactgatatcttcatagtgcaccttcgtcttccgctccgccaatacgacttggcgcggtttttgaagctgctggtgcacgaataccgtacgcaggatgtcatatgtccggatcagctcattgacgcttttttcaaaaagctccagctgaaagcttccgtgaatcctaagctctaattgtgtgaagtaggaggaagaatgcggatcaagcagcgcatgatacagcattccctcctgcatcggtgtgagtgcatacaccttttgaattgattttttgctcatatgtcacctctgccttttctgttagagaatttccattaatttatcaagttcatcaagcgtcagatcatcatcgccaagatcactaggcgtaagctcagatccgtcttgggccaagcagtgatctatgattttcaggaggtgccctttaaagctgtcactgaacgattgaatggttttttcatgaaattcgagagaatgataggcaaacgtcatcgtcatctgcccattttctataaatccgacaatatcaagcgcattcggcttctctgtgtcagggctcagcgattgccctgacggcatcccggatcttgtaaataagccggaatctgacatctcattaaactggcctaagtagttaaagctgatatccggatcaatctcaaatgaaagattctctttatgctcaggcgccgttacataacgcagaatgccgtagccgactcctttgttcgggatgtgtctgatgtcttctttcatttgtttcagctgatatgaaagatcgtcggcgtgcttcatctcaaggatcatcggatacatgctcgtaaaccatccgaccgtccgggtgatattcaagccgtcaagaatgtcttcgcgcccgtggccttccaaatgaacgccgatcgtgtcttcacccgtccactctttcagcgccagtccgagcgccgtgagcaggatgtcgttcatttcggtgtgataggcttcatgtacgtttgtcgtcagctgttcagtttgttcaggcgtcagagagaagctgaccgttctcgtatgtctcatgcgctgatcaccagactgcctgtctttcggaagctgagtgcatacctctttttcctcaagctctctccagtaatccgcttctttcagaaacgccttcgtatttgcatattctttgattctctcggcaaattcggcgaatgaatgtgttttcggcggcagcgccggttcattgccttgcttcagctgcgtataaacggacgtgaagtcctccagtaaaatccgccaagatacaccatccacgactaagtgatggattgcgagaagaaggtggtctccatcttcagcccggaagagcccggccttcagcagatgtcctgtttccagtgaaatactgctttgaagacggtctgcttccctttcgatacggtcctcatggtcttcagcaggtccgttcagctcaaagacgttcagttcaacagacgcatcctcaagccctctgtaatacggtttttgttcacgataaatcatccggagcgcatcatggtgcaccgtcaggacatgtaatgttttttctattctctccggatcaaagccgtctttcgcgtgaagcatgacggattggttccagtggtgtttgtccgtgaagtttttctcaaagaaccagcgctgtatcggcgttaactccgctttgccttcgacaggtccctggtcggcctgcttgccttccgtccgctccacataagagacgagctcttcgatggtcggatgctggaagagatctttcatctccagcttgtagccgtgctggttcagacggctcgccatttggatgcctttgatcgagtcgccgccgaacgtgaagaaattatcgcttacgccgatctggtcaagaccgagcacttcctgccaaatgtcggaaagcagcgtctccatctccgtttccggcgctttgtaagcggcgcttcccgcttcaatgtccggttccggcagggcttttttgtcaatctttccgtttgcggtgaccggaagctcgtccatctccacccagaacgccggcaccatgtagtcaggcagcgtgtctttcagcgcggatttgagcgcttcaatatcgtcctgctgaggcgcgacataggcgcaaagcgcggtattgcccgctttgtcttccaccgccgtcaccgctgcgtcatgaacgtccgcaagctgggcgaggcggacttcgatttctgaaagctcgatccggtagccccgcactttgacctgctggtcaatacgcccgatgtattcgatgccgcactgcgcgttccatttgacgaggtcgccggtccggtacatgcgctcgccgggcacgaacggatctgcggtaaaccgcttcgccgtttcttcttcacggttcaggtatccgcgcgcaagaccgcggccggccacacacaattcaccggcaatgccttccggctgcatctgatcgccgtcgccgagaatataaactctcgtattggcaatcgcccgtccgatcgaaagcgacccttcctccggattgatgacgccgcttgtcgcgacgacggtgttttccgtcgggccgtagttgttgacgatcgtgtacggctgtttcaccgcccgcttcagcttgtcaccgccgacgagaagcatgcggagagaggtattttccagctccataaattgttcggccagctgcgtcggcaggaaggtgatggtcacgccgttctcctcgaaatagtgatttaagcgtgtgatatccagccggatcgcttcgtcaatgacgtgaagctccgcgccgatggtccatgtcgggaacatttcccagatggaggcgtcaaaaccgaagcccgcgtatttggcgcttttatcatccgccgtcatggcgaatgcgtcgtgatgccagaagcacaggttcaccagcgcatggtgttcgaccatgacacccttcggctgtccggtcgttcctgacgtgtaaatcatataagcgagatgatccgccgttgtttctgtctgcgggttcgcttcgtcgttttcatcaagcggcaggctcagaatggagcgtccgccgtcaagcaggatcgtttctcctttgtagctttccggcacgtccagcgcttcctgtgtgagaagaagcttggcaccgctgtcctgcagaatgtagctgatgcgctcttccgggtattcggggtcaatcggcacaaatgccgcgcccgctttcaggacgccgagtacgcccgcggccatttccaaggacggtttcgtcaaaatgccgacacgttcgtcagccgtgacgccgcagtccatgaggatgcgcgcgatccggttcgcccttgcgttcagctcgccgtacgtccatttcgcgccgttgtatgccgcggccggccggttcgcgtggcgggcagccgtttcttcaaagagacggtgaaccgttttgtccctcggcacagaaattgtttttcctttccatgcgtcaaggagggcttgtttttctgttttattcaccaatgaaagctcagaaagcttcgcagccggattttccgctgcggcttctaacagttgaagccagtaatgcttccatgtctctgccgtttccggtttaaacagcgcggtgttatattcaagcacaaacgttaagccttcgtctgtgtcctcagccgtcattgtcaggtcaaacttggctgtttttctgtcaaacggatggtgcttcagctcaattccttccatgaccagatcttccgcatttgcattttgcattgaaaataccgcatcaaacagcggatttctgctcgtatcacgctgcacctcaaccttttgcagaaggtcttcaagcggataatcctgcgcgtcaaatgcatgtaaagcggtttgtttcacttctttaagatagtccgtgaacgttttgtccgcttccggatacgtacgaagcgcgagtgtattcacaaaaacaccgatgacgtttgcgagatccgcatgtgaccgtcccgcaaccggcgaaccgacaatgatgtcatgctgtccgctcagttttgagagaaaggcgctgtatgacgccagcagcaccatgtacatggtagaatccgtttgtttcgcaagactgcgaagagccgacgtctgttccccagtcagagaaaagaccagcttgtctccttcaaaggtttgcacggccggacggctgtaatcagccggcagcgtcaataccggaagctcgccgtcaagctcccgaagccaatactcctcctgcttgcggtactgctctgattgaataaatttctgctgccataccgcatagtctttataatggatccgcagcggatcaagcgtttcgccgccatacaagcgggacagttcatctatcagcacgccgactgaagcgccgtccgaaatgatatggtgcatgtcaaacagcagcaggtggtcatgttcagccagcttgaccagtcccgttctgacgagaggaagctgatccaggcggaacggccggataaagctctgaataatccgttcagcatcttcttcagaggcttcataatattccatgtcgatatcagcttccgcccatatgcgctgaaccgtttctccatcctttatgtcaaatgtcgttctgaaggcttcatggcgttctgtcagctgtttcatgacggatttcagcttttctgcatcaagctttccttttaagcggagcacagacggcatgttatagcttgtttcagcgccttccagctgctgaagcacaaacatccgcttctgcggtgaagaaaccggatacgtttcccgctcggcagccggtgcgatgctctcagccgccttccgctcagccccttcaatcagctgcgccagccccgcagccgtcggagaagtgaacagatcctttaaggtaagctgcacgccgaatgtcttctggataagggccagcagtttcatccccgctaacgagtggcccccgatctcaaagaactgatcatggacgccgacccgctccatttgcagcacctcagcccaaatatccgccagtttttgttctgtttcattgcgcggcgccgtatatgacacggcattcgctgcggtcacatccggcatcggcagcgcccgcctgtcgatttttccgttccctgtaagaggcagttcatccaattgaataaagacggacggaatcatataagccggaagatccttcgccgtatgctccctcagctcccgggaagagatttccctgaggccgacaacatacgcgcaaagaagtttgtcacccgcgccctgatccacagcgagcacaatgcattcctgaatctggtcatgactttgaagctgatgctcaatttcgccaagctcaatccgctgaccgcgaattttcacctgatggtcgatacgtccgataaactcgatatcgccattcggaagccatctggccaagtcgcccgttttatacatccgttcaccttccttaaacggatgctttacaaatttttcttccgtcagttcaggacggttgtagtagccttctacgagaccttccccgctgacgcacagctctcccgcgatacccgccggctgaatgcgtccggctgagttcatgataaagacttccgtattgctgaccggtttcccgatcggaacggagagcgtatcctcttcaatgacatccaccggatggtatgtcgcaaacactgtgctttccgacgggccgtacatatgaagcagtcttccttttccgactgccgccagcgcctttttgacatgttctacagacgctctttcgcccccgaacatgattttccgaagcgtcgtcagacaggacggctccatatcaacaagcaggtggaacagggccgtcgtaatcatcagaatgctgacgttctcccgtttgatcacacgggacagacgtgacatatccagcaccgtatctttcgggacgatcacaagctttgcaccgtttaacagcgaaccgaacatatcaaacataaaagcgtcaaagacgtagtttgacagaccgagcactgtgtcctcttcagaaacggtcaaatagttcgtgttttttaccgtccgcaaaatgttggcatgtgtgacgatgtttcctttcggcgttcccgtcgtgccagatgtataagtgagattggcaatcgttttggaatcaaacggcaatgctggattgcgagagtccttttcatagctcgcctcatcatcagcaagcacaatgacgccttgaaaaccggccttttccgcaagcggcttgagactttgctgagtcatgagcacattcgccccgctgtcgcggaagaaatgctgaatccgctgaaccggatgctcaggatcaatcggcacataggcggaccccgcttttaacacagccataatggaaacaatcatatccattgaccgttcacacagaacagccgcggtttttccgccgcctccgactgaaagaatatgccgcgcaagcctgttggcgcgttcattcagctgctgatacgacagggttttcccttcgaactgaagagccgtccggtcagggttctttcgggcctgttcttcaaagatctgcacgatcgtttgctctttcgggtacgccgtgcgctccggattgaaccgctgtaattgagtcaaagcctcccgttcagaaagcagatcatattcgctgattttcacatccggctgagctgccgcgctctccagcagacggacatagtgcgcaagcatgcgatccgcagttgagcgcttaaacagcttcgtgcaataatccaaatcaagcgcaaggccttccgctgtttcccgggcctgcatcgtcaggtcgaatttggcgatattgaagtttgtttcatgaagagacagcgtcagattaccgatctccggaattccgtccgaagcattttgcagactgaacatcgtatcaaatatcggatgcctgctcatatcccggggcacattcagctcctcggtcagccactcaaacggatagtcctggtgagaaaacgcgtccagcacctgcttgcgcacatgacctaacaagccggcaaatgtctgatcctgcttcacggagcttcgcagcgcaagcgtgttgacaaacatcccgataagcccctcggtatcagagtgatttcttcccgctgacggtgttcccacgatgatgtcttcctgtcccgaatacttagaaagcagcgtatagtaagctgataacagcaccatgtaaagggtggctccgtttttctcggcaagcttctgcagccgttcccgcagcattttcggcagcttggcggacacgcggtcaccttcaaagctttgcacctgcggccgcggataatcagggagcagctgaagcaccggcagttcgccgctgaagacttctttccagtacgcccgctccttcttgtagccttctttcgcccgttccgcctgccatacggcataatctttatattgaatgcgcaattcaggcagctgatttccgccgtagatgtcagccagttccttcagcatgatggaaatagacaccccgtcagaaatcaggtgatgcatatcaaacagcagcatatggcgattgtgatcgagcgtttgcaggccgattctgaacagcggcgcctcagataaatcaaaacggcgcacaaagtccttcatgacctgttcattcgttcttccgcgcgcttcgatcatttcaatatgaaacggaacatgttcgtgaatcacctgtctcggcgtgccgtcctctgattgaaacgatgttctgagcgcttcatgcctgctgattaaggcagaaaatgcacgctcaagcttttcacggtctaaagcgccctcaatcatggccgcagccggcatgttatatccgactcccgcgtcttcaaattggctcgcgatataagtccgctgctgagcgagcgaaagcggatagctcgcctgcttctcagccggctcaatcgcactgaatgccggtccttcgtttcggttttccgcataatcggcaagcgctgcaatcgtcggatgctcaaacaagtattgcagcggaatttcaacgcccatttgcttatgaattttcgtcagaagcgtcatggcctttaatgaatgaccgcctaactcgaagaaatgatcataaatgcccgccttgtccattccgaggacttcctgccagatgacggtgagcgtttcctccgtttcatttctcggcgcggcatattcggatgagctgacagcctgcacatcaagcgcaaacagctttttgcggtccgccttcccgctcggcgtgagcggaatttcgtccgtttttgtaaagtaagcgggcaccatgtaatcaggaaggtgctttgacacatactctctgtactcggcagggtgaaactcggttcctttttcctgaacgatatatgcgcagacatctaagctgccctgctgatccggccgtgccagcacgacggcctgcgccgcgcccggagcttttctgagcaccgtttcaatttctcccagctcaatgcggtagccgcggactttcacctgatcatcttcacggccgatatattcgatcgtcccgtccggcagccagcgcgccatatcacccgtgcggtacatgcggccgcttccgttaaacgggtcttgcaaaaacttctctgcggtcaaatccggcagatttaaatagccgcggcctacaccgtcacccgcgatatacagctcaccggccgtgccgtcgggctgaagccgctggtgcttatccaatatatacagacgggcgttgccgagcggttttccgatcggaacgtacgccgcctgttgattcattccgttatcggctgacacctgatgcacggacgcatctacgcacgtttctgtcggcccgtagacatttgtcagacgcggcgccctgcccgattgatgaaagagcgtcatcagctgctcggcaacagccgcggacaggccctctcccccaatgagcatgtggcgcaattcaatcccgctgacatctcccgccgcaaccatcatctgcagatgcgcaggcgttccgtcagtggcttcaatccggttttgacgataatagtccagcagtgccgagccattcgttacagtcgttttcggcacgatataaagcgtctgtcccaaaagaagcgatgcaaaaatctgtttgacggacgcatcaaaatgaaacggagccaaaagcgccattcttaacgtctgctcaccgcattgataaatctcctgctgcagtgattgcaccagatgatgaacttgccggtgctcaatcatcacgcctttcggccgccccgttgtacctgacgtgtagatgatgtaagccagccggtctgattgtgtgctgacaccgtccgcagccgtttcaaactgaacagcctcgtcaaaatcaatccgttcggcatccgctgcaggcacctgtattccggcctccgtcagaacagccttcgctccgctgtcctctaaaatgtactgaatccgatccgccggaaagtcaggatctatcggcacataggcgccgcccgctttcaaaattcccaatattgccgcaatgacacgctcagaacggccaagcaccaccgcgacaggagaatcggctgatatcccggcttgaagaaggcgtccggcaatacggcctgattgttcatgcaatgtgcgataggacaatgttcggccttcatacacaaccgcgggtttgtcagacagtgacttcactttctcttcaaacagccccggtatcgtcatctccttgcggtaattcaccggattgccggaggcccgtttcagcagccgctctttctcggattcagaaagaagagtaagttcatcaattatgcgatcaggagatgaaatcgcatcttcaatcagcgtgatcaaacgttcagaaacagattcaatctcttcccccttgaaaatgtcgctgcgatagtcaaaatcaatcgtcaatttcccagtgtcccatcgttccttcacatgaattgaaatatcatttgtaccgcttccgctgaaaatagggtctgtcaggaaggacagattctcttttttctgccactgcatcacctggtactccagagccaccgtaaacaatctgctcagcgaacttttcgaagcacgcaaatcatttacaagcaggttatacggatacttttggtggcggagaattttcatcagatccttcatccggcctttaacgaattccaagaatgactgtcctccgtcaacgcttgtccgcacaggcaccgtagatacgaacatcccgagcatctgcttttctttcgcattcgtccggtttcccataaacgtacccgtgacaacgtcatcccggccggtcactttgtagagataagtgatcagagctgactggaacagagatagtacgctgactttatgctcctcgcagaatgaatgaatgcggccatataagtcgtgaggaatttcttgagaaaaccgtttcgcatcaagacccgcatctgcccggctccgtttcagggacacaagctccggcacggtctcaaactgcccgttccaaaagtcccgatccttcttaaaccgcttcgactgcacatattcctgctctgtcagcacgtgctcgataaaagaaggaatctccgtctgttccccacttgtcccgcctgaaagctccaaataaatatcagtaatcgcattgcccagaatcgtcatggaaatcccgtctgaaataatgtgatgcacatttgcgtaaaaccagacctcattttcactgatcgtgtgcacggaaaaacggaataaatcctgatcatataacgccagaggcttgccagcttcttcacgcccccattttgacagctcgtccgcagagcagccggcttgcctgatatctgtgtgcccgatggagagcggacggtattcgctcacatattgaacgggctccccctcatcatcaagccgcagacggattctcatcgactcataccgccggacgaattcctgtatcgctttctcaacgtaatgagcctgtacgccgtcttcagaaatgagtttcccgaacccggcaagatttgaaatacttgtgttcggatagaatttttcagtataccagatacgtttttgagcatttgttaaaggataaaaagttatttccatatgtgtgcgcctcccctttttaagatatagttgtcaattctcccttagaaacagcctccctctatgtccctaactcattctcaagccaaaagaaccacttacctcaaaaacgatcccgattcaatcaccgccgaaatccgtcatccgttcacccgcgcagtccgaaatacggcatcaaatttatgagaaatcaagacaaaaagccattgattgtaagcacgaaaggtttacctatttctgcatgtatttctatatatctacttacgttcactttatatgaaaatattgtttttatcaccgaaaaatgggtgaaaagtttcatgcggcacaccgaaaaaaaatccgacaaatccagagggtattttgcggcatcccgcaatttattttcaaaaatattatttacgtaaaattaaaaatctttaaactataatgaaaacctgtcgaatatccagttatggcagaaataaaaaaaatttacgtacgtaagctgacccggaaaaaaacagcgcaagaaccgaaacagacggcccgaatgttcgcaatatgatttcattaaaccgcaaaaaaagcactctattttacatagagcacttcaaaaagattcctttattgcagttttatcaatgttgattaattccatataatcttttccccacttatacatggcgtccagaatcggcataaggctttctccttgcgccgttaaagaatactccactttcggagggacgacagggtaaacttccctgtgaacgatcagatcctgctccagctccctgagctgattcacaagaattttgtgcgtaatatccgggattaaagctttcagctcattaaaccgcttcgtcccttcttttcccaagtgccacataatcagcattttccactttccgcctatcacggctagcgtcaattccttttcgcaattaaacgttttctcatccattcggctcacggacaattctccttcctcttactttttgtacggtcatcatctattcatacacgcttactttttcacacaactttcatcagtttatactaccacgctgttttgctgaaacaaagcgcattgcctgcggggacagtatcctcaaagtaactattagacttcaaagtgcgtacttctcaacatgcagggcactttatagaatggaaatacataaaaaagaggagtggatataaagtggaattacagctggcattagacttagtaaatatcccggaagcaattgaacttgtgaaagaggtcgaacaatatatagatgttgtagaaatcggcactcccgttgtcattaatgaaggactgaaagccgtgcaggaaatgaaaacagcctttcctcacttgaaagtgcttgccgatcttaaaatcatggatgcaggcggttacgagattatgaaagcggcagaagcgggagccgacatcatcaccgttttaggagcgacagacgactcaacgatcaaaggggccgttgccgaagcaaaaaaacagcagaaaaaaatcctcgtcgacatgataaacgtaaaaaaccttgaaacacgggcaaaagaaattgaccaactcggtgttgattatatttgtgttcatacgggttatgatcttcaagcagaaggaaaaaattcattcgaggaactgacggcgattaaaaaagcggtcaagagcgctaaaaccgcaattgccggaggcattaaacttgatacgcttcctgaagccatcaaacaaaacccagatttaatcattgtcggcggaggcattacgggagctgacaataaagcggatgctgctgctaaaatgaaacagctgatcacacaaggatcatgaaaacgactgaatacttacatgaaatactaaatgaaatatcccgcaccgcagcattaatatccgacagtgaagctgacaagcttgcggatcagattttatcggcagatcaaatcttcacgtccggagcggggcgttccggctttatggctaaagcgttcgccatgaggatgatgcacatcggcctgaacgcttacatcgtcggtgagacgcttacccctcccctccaagaaggcggtctcgtcatcatcagctcaggctcaggcgaaacaaaaagtctgcttcatacagctggaaaagccaaaagccttaacggcatcatcactgcattaacgattaaccccgactcaagtctcggcaaacttgcggatcttacaataacgattcccggctctcctaaggaagagaccggcggagacagaaagacgattcagccgatgggttctttattcgaacaaactcttctgctgttttacgatgcggttattctaaaaatcatggagaaaaaagaattgaattcagcagacatgtttacaaagcatgcgaatctggaatgatttgctgacggccttcttatcagatggccgtctttttatcgtcttgttgcgcacggtcatacaggccaaggttttcgggtcggacactcgcagacgaagatatcctgccggtgagcttatcgctataataagtcaattgacgatacggccgcaaccgctcattctgaatagggaaacggcaaaaaacactttctgatcgaatttttaatgaataaagttgatttgtgcggatggttttacagatattcagctgaattgcggctgagaaatatattttaacagctttacagccggccgattctgctttattcttggaccagcttaacagcaattaaaactggaggtgattgatactcttgaaaacattaaaagcactgctgcttgttcttatcatcattgccggagcagtcgcggccctgatcaagggtgatcttttctcagataacgagcagaccgttcagaagaatgattacgacaaggtaatcctatttccgtccgatcgatatccggaaacagcaaagcatattaaggacgcgataaaagaagggcattccagcatatgcaccattgacagagacggagtacataagcgtcgtgagcaatctcttaaacatgtacctgtaaaaacgggatacgatagggatgaatggccgatggcggtttgtaaacagggcggaaacaacgcctccgtagaatatatttctccggcagacaaccgcggagccggctcatgggtcggacaccagcttaccaatgatcccgacggaacgagagtattatttaaaatcaagtaaaaaacaggaggaacagcgcattgattaaatcatggaaaccgcaagaactggccatttcttatcatcaatttacaatcttccaaaaagattcagaaccgcctgttatcgattggaccgatgaagccattgaaaaaggatatgcggaagctgacggagctgtttcatttgaggcaaggagaaatacgagggcatttatcgttctcaggcttaacacaagtgaaccggtaccatcctatgagaaaaaagcgactgttccctttgaggctgtaaaagatggaattgagattgaaagcgtgatgtcaaagcggcttttctttcatattccgaaaggccgatacagccttacctgttattcagtgcctgccgaaatatccgatcttcatgcggatacgtatattattgatgcagccgcaatgtaaaagaaatccctgagagaatcatatttctctcagggaacttttataaacttttaccgtttgtttcaattacattccggtaccaataaaaactttttttcctgatccgttcagagcaatcccgataaaaacaaaaaagcatccggcttgccggatgcttaagaatgatgataccgcttttccaatttatgaggcggcggcttcgggacaaacccattttgtttcatcatgttaaagcgcctgtccatatgctgtttaatatgttctgctttttctttcggcaggaccccgtactcaacatatttggatatgacatgttttcgtttttcgagcacttctttttcgagtgattcaatttcttttttctgctgttccgtgagtgacattgttgaaggcatttttgttccggcggcgtgtgccggcattgtgaaaaccattgctgtaatgaaaaacgcagctaaagacaatgcagcttttttcatgactctttcctcctttaacgtttgttatatgtttctccctcatccattttttatgcaaaaaaaaaagagcgaaattattcgctcttttcaatcgattcgtccggcagcgcgtatgtgacatacgttcccgctacaaaatcgtggattgaccgtttgtcttctctcattccgaccatgaatgcgctcacgatcacaccgattccaaacgtcaccccatatatcaggccgcccacaagcactctcaaaatcatagtgagaaagcctacctgagttccgtcttttttgacgatgcggataccgcagatctttttgccgataacataaccgttccagtatacagggagcaaaataccgtaaagagacaaaatgatgctgatcattgcgctctcattcggatcttttcctgttgccagcataaaaataatcgccaaaggcactgaagtaattaaatagtcgagtaccacagctcccaatctgatccaaaatcccgccggtctgtaaatattcatcgtgtttctcctcgctatggctttaaaatcactttaatgttgccatcttcttttttgtcaaatatatcatatgcagcaggagcttccgcaagactcattttgtgtgtaatgatgtccgttggatcaatttcattttgttcgatcatttgatacagcatcggcatcagatgaataacgggtgcctggcccatttttaaagaaacgttgcgtgtgaaaaaatcaccgagcggaaagccgtccgcttcagaaatgtatgcgcccgtgagctgcacggttccgaacttcttaacggcttctgatgctgtaagaatcggactgatcgttccgaactgattcggtttttgctctgttttttcttttgaaagcggcgtgccgtccattccgacacaatcaatcactacatccgcgccccctgacgtttgttcatgcagcagtttcccgatctcatcatgttctgaaaaattgaaggtctctgctccgtttatgcgtctcgcatgttcaaggcgatgcgggacttgatcgactgcgataacccgctttgctccttttttccacgcgaatttttgcgccattaatccgatcggacctgatcccagaatcacgacagtatctccttttttcactccgctgtgctggacgctccaaaaggcggtcggcatgacatctgacagaagcagcacctgctcatcttcaagctcactgtctgccggaaccagaaaagaagagaaatcagcataaggaacacgtaaatattcagcctgcccgccgggataattaccgttaaactccgaaaaaccgaataagccgccggcatctgtatgaggatttggattagattcatcacactggctttccatctggtgcttgcaataatgacattctccgcagccgatgttaaaaggaatcacgacccggtcgccttttttcagctttttgacttgactgcccgtttcttcaacgattcccatcggctcatgcccgacgatataacccggatcggcgggtattccgtttttatataaatgaaggtctgaaccgcatatcccggttgcggtgattcgaacgatgacatctctctcatcttgaatggcgggtgccgggacttctttcacttccatatgttcttttccttggtatgtcagtgctttcacacttggtcagctcctttttcatcactccttcccttttcacctgcttctaaacttggccggtatgttattcggcccgctgaatatcccattgaaaaggatcttcaagctgcgaccaatcggaatcgaactcagacggcgtgagcaggcactgatccaattcctttgtaatggctgcttcatctaaatctgttccgataaacaccaggttcgtatgacgatctccgaattggtcgtcccaatcttccagaatctccggttcctgctgtttgatctgctcctgctcaagtttcggcattgccgccacccaataagaaacaggctcaatcgaaaccgccggacccgcctgagacatcagcagcgcaaggctgttgcgtgttgcgcaccaagcaattccttttgcgcgcacaatgttgtcaggcattgattgatgcagccagctgtcaaaacgaacggtatgaaacggcagacgccgcgagtacacaaacgaagtgatgccgtactcttccgtttccggagtgtgcgcttcatgacctgccgtcagttcctttatccatcctgctgatgaactcgcttcctcaaactcaaataaaccggtattcaatatgtattcggcgggcacttctccgcggacggaccggatcagtctggcacggggctgtaaagcgcgaaggaccgtttccagctgttcaagctctttttcgcccaccatgtcgcatttatttaaaatgagcacatcacaaaactcgatctggtcaattaataaatcggcaatcacccgttcatcctcttctcccgccgcttccttccggtcaagaaggctgtcaccggactggaaatcatgccagaagcggtttgcatccaccacggtcaccattgtgtccagcctgcagaaagttgtcagatcaatgcccatttcttcatctatataagaaaatgtctgggcaacgggaatcggttcgctgatccctgttgattcaatcactatataatcaaatctgccgtctttcgcgagtttctcaacttcgactaataaatcttcacgcagcgtgcagcagatacagccgttggataattctacgagtttctcatccgtccttgacaagccgcctccctgcttcaccaagcccgcgtctatatttacttcgctcatgtcattgacgatgacggcaatttttaaaccattgcggttttgtaaaatatgattcaaaacggtcgtcttaccggcaccaagatagccgctcaatactgtaaccggaatttttttcatataaatagccccctatcaaaatagaatgattacgatttacattccgcacctgccttattttcatcatgatgtacatggttataaatcgtaatcgttactatttattctgatatattctccgtttaaaatcaagtggaaaaataatcaatcataaaaaagacacgctgtcatacgtgtcttccgcccaaacttaaacatccgcaggactgttttcagtgccatagctttttctccaaaaatagcctgcggccagaacaagcacaaatgcgagcaatgcgatacatgaaaaagagataaaaccgatcgcataagtacccgtcatctgcttcaatgatcctaaaatattcggaaggaaaaaaccccctatgccgccggccgctccgacgatccccgtcaccattccgatttcttttgcaaagtgctgagggacaagctgaaataccgctccgttgcccataccgagcgccatcattccgataaacaacagaacgacaaccgttgaaagcggaggcaggctactgactcccgccatacacagagccgcgatgacaaacagtacagcgagaacttttgcacctcccgcacggtctgaaatccagcctcctgcagggcgaaaaaaactgcccgctgcgacacatattgtgacgaaatcaccggcatggatttttgacaattgatattgatcaacgaaaaaaatcgccaaaaaacttgataatcccacaaaacctccgaaagtgacgccgtacaaaagacagaaacaccatgtctccttctgcctgaaaacgtgaaggtagtttttaagcggctgcggtgcaggctgtgcaggagagtccttcgccatgacggtaaacagtataaaaacgatcatcaacggaagaagcgcaattcccattacactgtgccacccaaactgttccgcaaggcggggaccgaacaatgttgcaaacaaagtaccgctgttgccggcacctgctatccccatcgcaagcccctgcaagtgaggcggataccatcggctcgccatcggaagcgcaacagcaaaacttgcgcccgccacgcccagcagaatgccgatcgcatacagctcagtcaaagaacggccgccgaatgccccccaaagcagcgggatcatcgtgatcagcatcccgatcacggctgttttcttcggcccgatcctgtccgttaacacacctaaaatgatccgaaacacagatcctgataagatcggcagagccacgacaaaccctttttcaaaagaagataacccgaaatcctgagaaatataaacgccgagcgcccctagaattacccaaatcataaaactcacatcaaaatataagaaggaacagagcagagtgagcggatggccgcttgtttttaattccgacagcttcataacattctcctttccggtcttctatcatttcaaattgctgaatcaagaatatatgaccggcattcaccggaaaagacatgtgtaagataatgcgacacatttaatgcgttaatcaggcaatgtgccataatttctcatagagaagcaatcttacaggcagcttcaaaggaggtttggcgaatgaagaaacaacgattaattgcagcagggaacggaatggccggaatccgctgtattgaacatattttaaagatgaaccgtgacatgtttgagattgtcattttcggaagcgaacctcatcccaattacaatcgcattctcttatcctccgttttacaaggtgaggtttcgcttgatgacattacgctgaatagccgcgaatggtacgagaaaaacggaattacgctttacacaggagaagcggttgtagacattgatacagaacggcaggttgtcacaacggatcgaaagcgcagcatgacttacgatcatttcatcgcggcaacgggctcctctccttatattctccccatacccggagcagagaaagaaggcgtctgcggctttcggacaatagaggactgccaatcccttatcaatgcggccggccggtatcaaaaggcggcggtcatcggcgccggtttattaggtcttgaagcggccgtcggcttacggcagctcggcatggacgtcagcgtcattcaccactcttccgccattatgcaaaaactgcttgatcaaacggcatcccatctgctgcagaaagaactggagcgaaaaggcttagtctttcttttagagaaagacacggcatccattacaggaaactcacgggcggaaggcatccgtttcaaagacggttcttccatagaagcagacctgattgtcatggccgccggtgtgaggcccaatatccgattggctgcatctgccggactttcagtgaaccgaggaatcatcgtcaatcaattcatgcagacgaacaaaccgaatgtgtatgccgtcggtgaatgcgcggagcatgacgggattgtatacggattggcggcgccgctttatgaacagggaaaagtgctcgcgcagcatctatgcggcgtcccgtgcgaagggtttcaaggctttgcacaatctgcagccttaaaaatagccggtattgatgtatggtcggcaggaaaggtgcacgaggatgagcacacagccggcatattgttccatgatgagcatgcaggcatctacaaaaaagcgctctttgaggacgataaaccggccggctttattttattcggggacacgcgcggtaaacagcggcttctcgacagtcttgtgaagcaaagagatatttccatcgtgaaaaaacagctcatggaaccggatcaaggcggtatatcctttgaatccatgcctccccatgaaaccatttgccaatgcagctcagtgaccaagggctccattgaagaagcggtgaacaaatatggcttaaaaaccgcggaggaagtgaagcacatgacaaaagcgtccgggtcttgcggaggatgcaggccgctcgttgaagacttgctgaagtatatggcgagcgatgattacacaaaaccctcccgccagccttcgttttgcggctgcaccgatttgacggaagaagaagtcatcgcggaactttggcgccgtccgttcactgatgccgccgaggtaatgaaagagatcggctggaaaacagaaaacggctgccgcatttgtattccggcgcttcactattacctggaaaggacgcggcctgattttatgcagctcaatgaaatatcggcagaagagacatgcaccctgattccgcaaatgtacggcggactgacaagtgcggcagagctcaaaaacatcgcagacgtcatcgaagcatacggcatccccggcgtttcgatgactgacagtcaccggctgaggctttccggaatcaggccaaatgaccttgcaagcatcagaaaagcactgaacatgccggttttctccccccggcaccgctggacgattcaaatcagagcatgtacgtgcggacagcatcgctcctttcaagagctggcaagcaggattgaacgagataccgacatgcttgccgtacccgcttatgtatccgtcagcttgtcatgtgaaaacaattgcaccgatgcttacattcaggatatcggcgtgcttcagacacaaacttgctgggaagtttatatcgggggcgtccgcggaaaacaagcccgcgccggcagccttttttgtgtgacgaataacgaagacagtaccgccgctatgatgaaaggccttattcagtattatcgcgaaacggctcactacaacgaagcgatttaccaatgggttgacagactcggcctcgtccatatcagagaaatgctgtttgaagaagatatgcggacacagcttctgaaaaatctccgttcagacatatccctgctgcaaaaccgtctgccgggaaaacgccatacgaaaggatgaagctttttgactgaaccgatgctccgttatttccgtgacaaactgcaagatattcaatcggaaaaaacatatgagacgcaatgcccgttctgcagcatgcaatgcaaaatgcagcttacggaacaaaccttcgcggcacgaaagaaatacactgcaatcggcattgataatccgacgacacatggccgtttatgtataaaaggcatgaatgcccatcagcatgccgtgcacacttcccgcattacacgccccctgcttaaaaaaaacggtgaatttgtgcctgtctcttgggctgaagcgctgaatcgcataaaggaacaaatcaatctgatccaaaccgaacacggcaatgatgcgatggccgtctatgggagcgcctccattacaaatgaagaagcctatctgcttggaaagttcgcacggatcggcttacagacgaaatacatcgattacaacgggcggctctgtatgtctgccgcagcaacggcggccggccagacattcggcgcggacaggggcctgacgaatccattatcggacattccgcatacacgcgtcatcatcctggcaggcaccaatatcgcggaatgccagccgacgatcatgccgtattttgataaagcgaaagaaaacggggcttatattatcgccattgatccccgggaaacggcgacgaccaaaatagccgatcttcacctgaaaatcaagcccggcacagacgccgccctggcaaacggactcgtcaaaatctgcattgacgaacagcttacagacaaagactttatccgcacacgcacaaacggattcgataagctaaaacggcataccgacgctttggatctgaaagagatctccgaacagacaagtgttcctttggagcatatgcgaaaggccgccgtgaagtttgccaaggaaacatccggcatgctgtttacagcgcgggggatcgaacagcagactgacggtaccgcggcggtgaaagctttcttaaatatggtgctgatcacgggaaaaatcggcaagcctttctcaggttacggggcaattaccggtcaaggcaacggacaaggcgcgagagaacacggccaaaaagcggatcagcttccgggctaccgttctatcgaaattgaagaacaccgggcgtatattgcgaaggtgtgggggattcatcaggctgagctgccgcgaaaaggcgtctcagcctatgaaatgatagaaaaaatagctagcggcgacatcaaaggactgtttctcatgtgttccaatccggctgtttccggcccaaatgcgaatttcgtcaaacaagcaatcaagaaactgagattctttgtcgcagttgatttatttatttctgagaccgcggcattcgcagatgtgattttacccgcctcctcttatttggaagacgaaggcacgatgacaaatgtagaaggccgcgtgacattaagagaagcgagccgcacctgccccggagaagcgaaacatgattggcagattatctgtgacattgcctcggctcttggtaaagggcattatttcccctatacgtcggcggaggaaatctttaacgaactgagagaagcgagccgcggcggaattgctgattactctggcatcacctatgacaggctcaggcgggaaggcggtattcagtggccatgccctgaagcggatcaccccggaaccgggcgattgtttgagcactcatttgcccatcccgatcacagagctgaattaagcgtgattccaaatgaaccggccgtcccgaaagagaaaccgagccgcggctatccgctttatttaaccacgggaagggtgatgtctcactacttaacgggtgtccaaacgagaaaaagctccgccctggctgcaagacatttcgaatcctttgtggaaatccacccaaaaacggcggccgcctatcatatcgaagaccgtgttctcgtgaagatagaatccccccggggcagcatcacggtccggagcagatggtcggagaacgtacgaaaagacacgttgtttgtccccatccattggtctgacacgcaaaacgtcaacgatttaattggtgaagccttggatccggactgtaaaatgcccggttttaagatgtgcacagtacgaatcagccctatataatttttcataaaatttttagattttttagtattttttgttacatttcataacatgcaccttaaatatttgtttttgctgtgctacgctaaagaaaacatagataaggagcggatcatctgatgggaaaaaaacagctagtccttgttggaaatggaatggccggggtaagagcgattgaagaaatactgcgtgtttcaaaagacgaattcgagattacaatattcggggccgaacctcatcccaactataaccgaatccttctgtcaaaagtgctgcaaggcgataccgacattcaagacattacgttaaacgattggaactggtacaaagaaaacaacatccagctgtataccggtgaaacagtcatcaaagtcgacacggaaaacaaaaccgtcatcaccgatgcagacagaatccagccttacgatgaactcatcctggcgacaggctctgtcccttttatccttccgattccgggcgcagacaaacaaggcgtcacggcattccgggacataaaagataccgacacgatgctcgccgcgtcaaaacaatataaaaaagcagccgtcatcggcggaggactgctgggattggaagccgcacgcggactgctgaatctcggaatggacgtgtctgtcatacacctcgccccattcctgatggagcgccagcttgacgcagcggcgggacgcctgctgcaaaacgaattagaaaaacaaggcatgacctttttccttgaaaagcaaaccgaagaaattctcggtactgaccgtgtcgaaggcgtacgcttcaaagacggcacaagcatcgaagctgacctggtcgtcatggcggtcggcatccgcccgaatacacagcttggcacagaaagcggcattccggtaaaccgcggaatcattgtcaatgattatatgcagactgacattccgcacatttacgcggtcggtgaatgtgccgagcaccgcggaatcgcatacggtcttgtggcgccgctctatgaacaggcgaaagtgctggccaaacatatttgcggcattgacacaaaaccgtatgaaggctccgttctctccactcaattaaaggtatcaggcgtcgaagtcttctctgccggtgactttaacgaatcagaggacaaaaaagcgattaaagtgttcgatgaacaggacggcatttataaaaaaatcgtcctgaggggcaatcaaattgtcggcgctgttttgttcggcgacagcagcgagggcggccgcctgttttctatgattcaaaaagaagccgatatctccgaaacttccaaaatatcaatcttacagcctcttgaccaggaagcaggcgcaagcatgaccgcggcgatgagcgacgatgaaatcatctgcggatgcaacggcgtttcaaaaggcgcgattattcaagccattcaggaaaaaggctgcacatcaacggacgaaatcaaagcatgcaccggggcatcccgttcctgcggaggctgtaaaccgctcgtggaagacattcttctatatacactgggctcagaatttgacgcgtccgcgcaaaaagaagcgatttgcggctgcacatcactgtcgagagatgaagtcgtagaagaaatcaaagccaaagggctgtcccatacaagagaaatcatgaacgtgctcggctggaaaacgccggagggctgctccaaatgccgtcctgccctcaactactacttaggcatgattaatccggctacatacgaggatgacagaacatcccgttttgtgaacgaacggatgcacgccaatattcaaaaagacggaacatactcagtcgtgccgcggatgtacggcggcgtgaccaactctcaggatcttcgcaagatcgccgatgtcgtcgacaaatatgaaatcccgctcgttaaaatgacaggcggccagcggattgatctcatcggcgtcaaaaaagaagacctgccgaaagtatgggccgagcttgatatgccgtcaggctacgcgtacggaaaaacactccgcacggtaaaaacgtgcgtaggcgaacaattctgccgcttcggcacgcaagactccatggcactgggcattgcgcttgagaaaaaattcgaagggctcaatacgcctcataaggttaaaatggccgtgtccgcctgccctcggaactgtgcggaatcaggcattaaggaccttggcgttgtcggcatcgacggaggctgggagctttatgtcggcggaaacggcggaacccatttgcgcgccggtgatttgctgatgaaagtaaaaacgaatgaagaagtcttagaatatgcgggggcttaccttcagtactacagagaaacggcaaactatctggagcggacatccgcatggcttgagcgcgtcggtttatctcatgtccaatccgtattaaacgatccggaaaaacggcaggagctcaacgacagaatgaatgagacactctctgtccacaaagatccgtggcaatacttccttaaagataaaaaagcatctaaagatctattcgaaaatgtcgtcacgacttcataaaacagtaagggggaacggacatggttaataaagatatgacaaaggtttgcataggcaaagtaaacgaattacccgaggagttaggaaaaaccgtatatatagaagataaagagcttgccgtatttaagctttctgacgggagcgtccgcgccgtcgaaaatcgctgtccccataaagggggcgtcctggctgaaggcatcgtcagcggagaatacgtcttctgtccgatgcatgactggaaaatctccttagaagacggaaaagtccaagagccggatcatggctgtgtcaaaacatacgaaacactgattgaaggagagaatgtatacctcctgtattgagcaaagaccggatcactttttaagtggtccttcattttttaaattgctgaagggatgacgccatcatgaaaaacggaatcgtatattttgtcggtgccggaccaggagacccggggctgatcaccgtaaaaggaaaacaggctctggagaaagcggatatcattttgtatgaccggctcgcaaacccaaagtttcttgaatatgcctcaccggactgccggttcatttattgcggaaagctgcccgaccgtcattttatgaaacagtctgagataaatgccctgctgattgaaaaagcggcggagggctgcaccgtcgtccgcttgaaaggcggagacccaagtgtgttcggcagagtcggcgaagaagcggaggcgcttcatcagcacggcatccgctacgaaatggtgcccggcatcacctccggaatcgcagcgccgatgtatgcgggagtccccgtcacccatcgtgatttcgcttcgtccttcgcgatgatcaccgctcatgatacatcattgcaaggcaggccgaatctcgactgggaagggcttgcccgaagcgttcaaacgcttgtgttttacatgggcgttaaaaatctgtcatttatatgccggcagcttatggagtacggaaaatccccttccgttcccgtactcgtcattcaatgggggacgtgggggcggcagcggagcgttaaaggaacgcttcaggacatccatgaaaaagttcaaagccaaaacatcaccaaccctgccattatcgtcatcggtgatattgtcaattttcaaacacacagctggtttgaaagcaaaccgttcatcgggcggcatatcatggttgtcactcatggcgatgaagaacatacattgacagacaagctgcgcgagtatggcgccgatgttattgaatggccgaagcggatcgttaaaaaaatgcccgcaaacgaaaacatcctgaaacagatcagcacctttgaacaactatttttcacatcgcgccttgcggtatgcgaattctttgacacactggctttcaagcagatcgacatccgccgggtgaccgcaagcctaaatgcagcgactgaggccgcaaagacggaactgacaaaacggggcttcctcctatccgaatgtcaaattgattctccgcattcactcattgtaggaagccgtcaagcagcagaaaacttgtcagactcaaaatcatgctctttttatatcacccatgagcatatcgcggatgagcggttcacttccatgatcgaacgcacgatcagtgagtctcctctgcaaatgattatctgtacgggcaaagaatccgctcagcatttgatcagcgccggaaaacaaatcggcatatcaccggatccgtcagcaaaccgccctcccgtcatctgcatgggcgaagacgtccccgccggctgcgggtttaccgccgtgaaaaatcaggaacagttatttgcgtttatacgaaatgaaatgaaagacatgctcgttcacagctgatacgccggaatgcttttctgacccccaggctcaacatcgggggtcagcccttttttattgtgtcaccaattttttatggtgagtcgaatacatcgccatctgatccgcctgcgggtccaaatatgctttggcgctgttcacggcggtcggcccctccgtgaaaccgccggcaatcaatctgagcttgctttcataatgggcggcgtcaccggcgacaaacacgcccggaagattcgtccgcatatgtctgtcagctttaatcctgccttcttctatctcaagcccccagtccttcatcggaccgagatcaattttaaacccgtgattgataatgagctcatcaagcttgatggcttcagaaagtccggactcagtttggcaaatggtgacgctctcgatccgttctccggtgccgttgagatgcttcagtcgatacggcgcaagcacccgcacggaagaccgcttcattttcgccacgctgctttccaaaccgccgaactcctccctgcggtgcaagacggtaacagacgccgcaatcggttccagctcattcgcccagtcaaccgcggtatctccccctccggaaatcacgacatgcttcccctgaaacgcatcaagcttctccactttataatgaaggttctttcccgaataacggctcgcatccgcgctgtcaagttcattgacctcaagcgttcccatgccgacggccaaaatcaccgtgcgtgtatagtgcttttcccctttggaactttccagcacaatggttccgtcttccagccgttcaaatccggtcacccgctgattcaacacgatatccggctcaaatgtcgcagcctgttccttcagctgcttaatcagctgttctccggcaatcccgggtattccgccgatatcacggatgattttttcagggaaaaacatagacactttccctccgagccgcggcaaaaactcgatcactttcgttttcagctcgcgcatcccgcaataaaaagccgcaaacaggccgaccgggcctccgcctataatcgtgacgtcatacacctcatgattttccgccatcgttctgcctcccgtttatatctatacttcaacatttttaattgagaatcaatatcaatgaaagtataacacatattgaggagcagtgtttattcatttctcatcttgcggaaaaggagtgattcagaagtgaggttctgagattgataagcgggaaggtattaaaactgaaaccagtacggcgactggtttcttttttatctctttttcatcagcatgatatcgaggtacagctggcaccttgtcctgaagtcgtttaaattaattgatgtcatgtcaagaatctgtttgatacggtagttcaatgtgttttgatgaataaaaagctgttctgcggctggttttgttttgcagttattgaggagatagatttctaacgttttcagcagttcggtactgctttctctgtctttggcttttaataacgctaaatcatcgtttacatattccagtgaggcgtttttttcttcgatgctttcaagatagcggtaaatcccgagcttactgtattcgtacgggatattttcctggtttccggttatttctgcggcctttatgacttcaagggcctctatataacttttgccgagcttcaggatgctgctgtattcattgccgattccgatatagatgggagtggggatcttctgaaagtgaaaatgagtcagcagtttgtggataaattcagatgctgccgaagtgccggagcttttttgcgagaagcttgcgacgacgatgacaatattggaatcaatggttaagacgtgactgactttatcccgcaaattcaagtacgatttgatattttccttcacatcttcgactgcctccccatccccatttgcggcgtgcaggacgactactgaaaaaaccgacggcagcacggcgttcatcttttccgcttcccgcctgaactccttttcagaggagaattgctgaaagatcgcccgtttcaccaggtcttccgctctttcttctttttcctgtttcagccggttcgttttatagatgatttttccgacatggaatgaagtttcatataaaaaatcgagctcctcgtccgtcaagtttcggtcgagctcctgaatccagatgtagcccatcacttcccctttatgttttgcgcttacaaccactctctgattcagtccgatactgtctattttttcgacacggaacggttcaggaacggttttcagcttttcgatcaccccgtccttcagaaacctttcaaaaatctgcacggggcatttttttgaaaatatcgtctgctggttggcggagtcgaagtgattaatgtaataagaattataggcaagcaaaaagaaatccgcgctttccagaataacgggcttctgcaattcataactgatgaaatcaattaatttatcaatgtccgtaaatgaaaaaactctctctaaaagctcttccatacctatttctcctatgctctttttatctttatcatactctgcggggtgactttttgtatagaaaaaaattcacctattcccaaaacggcatgatccgaaagcctgtatcgtgaaaagaggaaaaagggcggtcccttcttcctctcgttccttgcttttattgagaaagtgtatcacggtactcatgaaactgatctgtgacatcttttgacggagcctgtgtcaataagctgacgacaaatacagcggcaaggcttacagcaaagcccggaatgatttcgtacaaaaagtctgaaagaccggcattcgcccaaatgattacggtaatcgctcccgcaatcatgccggcgagtgccccccatttcgtcatccgtttccaaaataaactgagcagtacgaccggcccgaatgacgcgccgaatccagcccatgcatagctgacaagaccaagtatcgtgttgtttttctcccaagcgagcaccaaagcgatgattgacaccgcaagcactgccattctccccagaaatacgagttccttatcagaagccgaacgcctgaacatggacttatacaaatcctccactaaagaactggacgtaacgagcagctgagacgaaatcgtactcataatggccgctaaaatcgcagaaatgagaaatcccgtaataatcgggtggaacagaatgttgccgagctgaataaaaatggtttccggatcagccagcttcagcccgtgctggtggtaatacgcgattcccgcaagacccgtaaacagcgcgcctagtgcagacaaaatcatccatcccattccgatccgtctggcgcgtttgatttctttcacagatgtgatcgccataaagcgcacaataatatgcggctgcccgaaatagccgagcccccacgcaaataaagaaataatgccaaggacggtcgtccctttgaacatgttaaacagttccgggttgacggaacggatatcggcaacggtttcccccgggccgcccgtatggaaaatcgtcacaatcggcacgagaataagcgccacaaacataatgatcccttgaacaaagtccgtccagcttaccgccaaaaagcctccgaacaaggtgtaggcgacaacgacgcctgtcacgacccacagtcccgtgtggtaattcaaccctaaaatgctgttgaataagacgcctcctgagaccatgccggatgatacgtaaaatgtgaaaaagacgagaatgacaagacccgaaaacagtctgagaagcttcgtatgatcaccgaaacggttttcaaggaaacccggaatggtgatggaattccccgctttttcggtatacgttctcagtctcggcgccacgaaaagccagttcgcccacgccccgagcacaagcccgagcacaatccaagcgccgcttaatcctgtcgagaacatagcacccggaagccccatcaagagccatccgctcatatccgccgctcccgcgctgagcgctgtgacggcagggcctaaagaacgccccccgagcatgtaatccgtcagatttgacgtccgtctgtaggcgaaataaccgataaacagcatacccgccatataaatacaaatggaaataatcaactgaatgtttgctatggcatttcctcctccgctttatatgtttatggtgaaatggacaccccccgcgaggaggatgcccattcagtccctcttaaaacatttcactgattgttttcgcctgcatgtggagggccaaataatccgggccgcccgcttttgaatcagtgccggacattttgaagcctccgaacggatggtagccgacaatcgctcccgtacaattgcggttgaagtacaggttgccgacatggaattcctgtttcgcccgttcaatatgtttgcggttatttgtaatgaccgcgcctgtcaaaccatattcagtattgttggccacttctaaagcttcatcaaagtttgacactttagaaaacgccacgacaggcccgaaaatttcttcctgcatgagtcttgctttcggatcaaggtcagcgaagatcgtcggcttaataaagtagccttttgaatcatctccggtgccgccgcttactaaacggccttcttcttttccgatttcaatgtagctcatgatcttgtcgtaagaaccttggtcgatgacaggccccatataaacatctgcactgtcaggtttagcagttacttttgattccgtaatttcaatgacacgctctaatacttgatcatacactttttcatggacaactgcacgtgaacctgcagaacatttttgtccggcaaagccgaatgcagatgtgaagatcgattgagccgctaattcaatgtccgcatcctcgtcgacaacaaccgtatctttaccgcccatttcagcaatgacgcgtttcagatgctgctggcccggctgaactttcgccgcgcgttcgaaaattctcgtaccgacttcacgtgatcctgtaaatgtgataaggcttgttttcggatggtcaacaagataatcgcctacttctgctccgcttcccggcacaaagttgactacgccttttggcaatccggactcttcaagcacctcaacaaattttgctgcaataacaggtgtagcactcgcaggttttagaaccactgtgtttccagtaacgatcggcgccactgttgttcctgccatgatcgcaaacaagaagttccacggcggaataaccactgtcactccagtcggcgtgtacacatattggtttttctcgccctcacggctgttgaccggtttgccttttgccagttcgatcatttggcgtgcataatactccatgaagtcaatcgcttcagccgtatctgcatcagcttcgttccaaggttttcccgcttccttgacgagcagggcggagaattcgtgctttctgcggcggactttggcagctgcgcggaacaaaacggccgctctttcttcaggggatgtgtatctccactcttcgaacgctttcgcagctgcttcaatcgcttgctcagcgtgctcctgggacgcctttgacacttttccgacgacttcttctttatcagccggattgattgaaacgattttcgcttccgtctctaccttttcaccattgatgacgagcggataatcttttcccagatactcatttaccgtcgcaagcgctttcttaaattcttcaacgttcgattgatcttggaaattcgtgaatggttcgtgtttataaggtgtagtcattgtcatctctcccttttttacttcttagtcatccctttaaaggcgaatgcgatgttagaggggcgttcggcgagccgtctcatgaaatagccgtaccagtcatccccgtaaggcaggtagactctcatgcggtatccttcttccaccaggctgagctgggtttgcgagcgcatgccgtacagcatctgaaactcaaaacggtcgtttggaatgccgtgctctttggcaagctgttttgtaaactcgatcattttgtcatcatgcgtggcaactgccgtataatgtccttttaaaagctgtttgcggatgagtcttttataattttcatcgacgtcgcttttttcaggataggccaccttttccgattctttataggcccctttgacaagccgcagaaacggattcagcgggctgaggtcatcaagatccttctccgttctgtacagataagcctgcaccacggtgcttacgtattcataccggctccggaagtctttaaagatatccagcgttttctggcatctcgtttcatcttccatgtcaatcgtcaccatgactttatgtttttcagccgtctggaggattttcgtcatattttcatagacaagatcgagatctatatcaagacctaaagacgtcatttttaatgacacttgggaattcagctgttcatcagcgattaaggcgatggtctgcatgcactcctcggtgcgttctttcgcgacatcaccgctgttgacaaattcccccaaatgatcgacagtaactgacagcccttggctgttcaaatgtcggattgtcgggatagaactgcggaaatccattcctccgatgattttgccggctgccacacggcttccccagcttcgcgccatcttattgagaaagctgctcttggataaaaataagaaaaaatctcttgtaatcacttccaaccttaacaccccgcaatctaagaagtatttgtatgagtctattgtaaatggacaaaacatcctctcacaatattctaaaaatacaaagattctgataaatttttgtggttttaccacaatcagcttcttagatagcaggcggattatgccgaaaaatggcggacggaaatgacggcaatcgtcaatttccgcctttttacccccacgcctcttcgacggtctgaattaatagctgattcagttcctccgttatgtcaggtttcggcgttttgatcgttttgacatagtgcccgatgcgttctatttcttcttctataaatgcatgaatgatcgtatttctcggttccggggccagctcctgaccgctttttttccttgtaagcagtgtattgatttcagaaatgagcgcttcatccgtcaataaggcatcggccagtacgggaaatgacatcggcggtacggagccgaacgtttcaatccatctgcaggcaaggagaggacgcagaacataaaaatactttttaatcttcacttcactgccccgcaattccgttttttcattccgttttgccatattgagataatgatagatgccggcttcaggcgaaaaggcgcggtttttcagttttcgaagcttttcagccgctgagaaagcttcataatagatcatctcagaagagagccattccaaaagaggcggatttgattttttaaaaagccgcagcgcttttctcagttcccagccgctgatgtcaagcatgtcatgaatcggctcttctatgacatccctatgcggttcgatcgaaaagtaccattcttttttcggcacatagagaaaccgtacatcgtagtcgctgtcgcttgacggaaatccccatgcgcggctccctgattctacggcataaagcaccttgacgccgtgctgtgcttcaattcgttttaattcttcgatgatcctttgttccatctgtatccgtccttttccgtgatgattcctgaaaaaagcccaagtacttgggcttttcgctgtcgtcagcctttcagatgcgctttcagaaaggccagcttttccgtatggaaggaaggtatgtattcatgtccgaaataccggtaaaccttcaattctttttccgtttccagatgattgtaagcggcaaacaccgtcgacggcggagtcacgcggtcaatcagcccgatggacatgagcaccggaacttttacgcggtccgccagattcatgatatcaaaataggccagtgtattcatcgcggccttctccgtttcagggctgccgttctttctgaaaaaggagttaatctcaagatacggctcatcaagggcgacatcaatggcccgctcaaaattgcttaaataaggataatcggccgcaaccgctctcggaatgtcagatagtgccgccgcggcgattgaaagtccgcctccctggctcccgccgatgacggcgatcctcgtttcgtccacttcatcaaagccgctgatgacttctaaagcccggacggcgtctaagtacacgccgcgataataatatgtatctttatctaaaatcccttttgtcatccagccgggaacgtgtccatgcggtgagacgcttgtatctgtgctgctgtgctgaccgcggacaagcatgccgaatgcggcatatccgtgaagcgcccaatttacgatgtcatgtatatccccgtcatagctcgcgttatagccgtgatatttcacgatagccggatgcggtccttcccggtcgggaacggcgtaccatccctcaatttccgccttgccgaagcttcggtatgtcagccggaatactttcacgccgtcagccgggtagctttcagccttcaattcaggctttgcctcttcctttgcaagctcatgtaatgatgatgcccaaaaatccgaaaagtcatgaggagcggttttatttggtttataggtttgcagttggtcgagcggcaagtcgtataattgcatatccgattattctcctttgttttataagatttaattttctgactctatcttaacacgattttacactcattttctaaacattttaataaacgtttgtttaaaaacaaaaaagccgtgcgctcacagcgtcacggctctttttacatcggctgatacaggtcccagccgatttttaacgtttctacgatataatcggctatttcttctggttccagattatccgtcgccacttttgaattatgtttatcatagatgctttggcgctcgttaaagagctgctgcatttcatccatggaacggttatgcagaacgggacggctttcaatcagcagatcagcccgctgcttccaattctcccatgataaatcaagatggagcacgagacagttttcaaggcagcactgtctgatttcctcttgtttaaacgaaccgcccccaagtgacacgatcttgaattttgtattgcggcagatatctaatatatagtccttttcagtctgacggaaaaaggcttcaccttttttctcaaacatttcagggatggacatattgaaatctttctcaatctgcagatcaatatcaatgaagtctctgtataatttcttagcgaccagctggccgattgttgtctttccgacacccatgaatccgatcagtacgatatttctttctcttacgggaatggcacgttttgcgttcatcttcggcgaaatcctcctaagaaatgaaaaagttatgtttattatatgataactcaatattgaaatatagagataatgcaatgaaagaaaacccatcctttattaagaagagatgagtttttctttctatcggagcgtaatgcgttccacctttccgacaatgaaaatataagaaaatgccccgataaatgcgacagcgccgacaaacagaatcgctccgttatatgaaccggtcgcagaaacgataaacccgatgataagcggagtgataataccggccatattggcgaaaaagttaaacacgcctcctgccaatccgattgtctcgcttggcgccacctcgctcagcatcgtccaggatatattggacatgccctgcgcaaaagaagcaatggataagatcgtcaaaaccgcaggcgcagattccgtaacattcgcgagcacgatggagcctgtcagcagaagaccgaggatgacgggcgttttccgggcaacgtttaccgacacgccccgtttcatcattccgtcagaccaatatccgccgaacaatacaccgaaaaaggcggcgatatacggaattgatgcggcgaagccgacttttaagaaagccatatgctttgcctccgccagataagtcggaaaccatgtcaaaaagaagaacagcgtggaggctacggcaaattggccgatatacaagccgacaagcttgcggtatttaagaagctggacgaaatccggccacgtgatcctgccggctgattctgacacctctgtcagtccgccgccttctctaatataatcaagctcttcccggttcacttttcgggaccgattcggctcgtgatacattttgaaccagaaaatggagaaaacaagcccgagcacccctgaggaaataaagacggcgcgccagtcaaatgccgttaacacccagaataaaaccggtgtggcgaacgccagccccacatattcccccgccgtataagcacccgtcgcaaaggcgcgttcccgccttggaaaccatgtcgtgacaatccggttgtttgccggaaacgcaggcgattcggccagcccgataatcaggcggcagccgaataaaaatccgaaactggccgcaaaagcctgcactccggtgaaaacagaccagatcaataaagaaacgccgtacgtccgttttgacccgaatttgtccaaaatgagcccgccgggaatctgcattcccgtataagtccagctgaatgcggaaaagacgacgcccaaaagcgcggggcttatgttcagcgatgtctgaatggacggggcggcgatggatacactggcacggtctatataattaatcgcagtgataaaaaacaaaagaatcagtatcacataacgagcgcgagtcggtttattgcggacgggactgaagtccgtcagctccgtttcatttttcaatggcttctcccccttactcgaatgaaattaattgtacaacacttcggtcaattatttaatactttgacgcaaaaaagcgctaaacaatttgtgtgccgcactgacctgatgcagacacaccccgcttataaaaaagtgtctgcccttttcacctgtttatccgtatcgcacccggggaaaaagtacacatatgatagacagttacgggaggattaccgatgaaactgagtttttgcacgacaggatttaaaaaaaagcatattttcgacgtcatttctttcgcgaaggagcactcctttgagggaatcgaactgtggtacggacacgctaaacaatatatagaggaaatcggcccgctcgacaggcttaatcagcagcttcaggaggaaggtatcggggtgcctgccgtcagtttgtacactgacttcgccactcaggatgaaaggcaggcgttaaaggatgttcaaagggcattaagcgcggcacgacagctgcgcagtcccttgatcagagtctttgccggcaatcttccttcgcatcggacatcaccggaaaagtggcagcgtgcggttgatcaatttcagcaggcggcacggctcgcagatgactatgaagtcgatatcgggcttgagattcattacgatacgtacgcggatacaccggaggcggcgctggcatttttggaggatgtcggacatccgcgggtccgcaccatttttgacggctccaacctacacgttaatcacgttgaccaaatgtccgctttaaaaaaactgtatcataccgtcagccacattcatctgaaaaactatcactggaattttgacaactggtatctcagcaagccggtgtctgttctgcaaggcgatttacggcaggaaccctttctgaaagaactgttgaacaggcactacggcggattcgtgtcactcgaatacttcggtcatcatgctgaagcgcatataaaagaatctctgaatgagatcaggcactgctttaagaaataaaaaacatcccttcagaggggatgttttttcaaattaagaaaaaaatttcagaaacatagaaggtattttatggataaacatctaattattaacactgtgatacatttcatttgaaaagggagtgctcgaaatgaaattcaaaaaagtgttaaccggttctgcgctgtctcttgccttactgatgtctgccgctcctgcctttgccgcatcaccaacagcatccgtggaaaatagcccaatctcaacgaaagcagatgccggcattaatgccatcaagctcgttcaaagccctaacggaaacttcgctgcttctttcgttttagatggaacaaaatggattttcaaaagcaaatactatgacagcagcaaagggtattgggtagggatttatgaaagtgtagataaataaaaatgagataaacaaaaacctccctttcaaaagggaggtttttttcattctatttccaccaatcatcaaacattgatgccggcacctggcgcttatgctctgtactgaggtagcgtttttccagcgcctcaatcacttcggaagaaacgtccttgccttctaaataatcatcaatgtcattgtaggtgatgccgagttcggtctcatcagtctgctgcggtttttcatcaagcagatcggccgtcggtaatttcaaatacaggcgttccggcgcaccgagctcttctaataaacgtctgccctggcgtttcgttaatccggtcagcggcagcagatcagctccgccgtcaccgtatttcgtgaagaaaccggtcaccgcctcggccgcatggtcggttccgatgacaagcagcccctcttgtccgccgatggcatattgagcgatcattctcattctggcctttacatttcctttgttaaagtcagacagctgatctcccgtgtcttttttgtactgatcagcgaacgcgctgacagcggacttaatatcaaatgtccaagatttatcaggcttaatgaatttgagcgccatttgggcgtcatcctcatcctgctgtgtgccgtacggaagacggacggcgataaattccgcgtttccgccttcttctctgatgctctcagccgccaattgggcgaggcgtcccgcaagcgtggaatcctgccccccgctgatgccgagcacaaagcctttggcacctgtttttttcaaatattgtttcagaaagttcactctgtcctcaatttcttgtttcggatcaattgagggctttacatggagatcattcataatttgtttctggatgctcatcccaatcactcctcctgcattgtttctttatgatccatttcccgttcatgctgaaaatgaatcatgccactatgtacgactctctgttaaatatagcacaggtgcggattttaagtgaatcaaatacaccgggatcagctgatttccacccgcagcgccgtgatgctgtcgccgttgcattttcctttttcgatcggacaggatgaaaacgccacgacgagatccatttccgcacggagccgtacataatcacccgcgtcagaaagaggcgtttcgactgataagttccctttctcatcgagcaccgtgttcataaagatggcaaatgggtaatgcatatgcggccgcggcaccccgaacggctcaagcgccccgctcatattgtcatagcacgtatcctggagctcgtctttatgctttccgtataaaagcctgttcatatccggacggcaggcgggaagcagcaggtcatgcttgccgactgtatcctcaatcagcgtcagcatcggcttgtataaattcgaataaatatgatcacccgttttcacatgaatggactggttggcatcaatcgtcgcgccctgatcaagatgttcatagaagtccttggcatgatacgccgtgaagtcagccacctgctgcccttccacatcgactacttttataatctgccctttgtgaaccttcaggccgagcccttttttcggcggtacgataaattgctgtgtcatcagactgctcctttttttcttctattatgaactccgtccgtttgtttcatgtaaagcaatttattggatgtatattccccttctgacggctgcaatctaagctttgataaaggggttgaacttcatgggtaaatcacaggaccagcctaaaggaaatctcgcttggtggcagctctccttaatcggcgtcggctgcacaatcgggacgggcttttttctcgggtccagtatcgctattgtcaaaagcggatattccgcgctgatctcatttcttattgccgggcttggcacctattttgtctttgagcagctcgcgaagctttcggctaaacagcccgaaaaggggtctttttgcgcttatgcgagaaaggctttcggcaattgggccggtttcagcaacggatgggtgtactggtcgtccgagatgctgattacgggaagccagctgacagcgatctcgctgtttacgaagcattggtttccgaatgtgccgctgtggattttcgcctccatctatgcggtgctcggtcttttgattatatttacggggctgtccgtttttcaaaaaacggaaaatgtgctcgctgttgtcaagacggcggcgatttttatgtttatcgtgatcgccatattggcgctgtgcggtatattttctcataaaccggatgtgcaggtgccgaacgaatcaaaggatttgttcccgcacggagcgatggggttatggacgggactgatttatgcgttttacgccttcggaggaattgaagtcttggggctgatgaccgtacacttgaaaaaaccggaggaagcctcaaaatcaggccggctgatgcttgccgtacttgcggtaatttacgtcatttctctcggcctggcgctgctgttagtgccgctgggcaaattcaccgagcaggacagtccgtttattacatcgctgaagggttttcatttagatatcattcttgatatttttaacggaatttttattattgcgggattttccacgctcgtcgcctcgctgtttgccgtgacgacattgctttgtacaatggccgatgacggggatgcgccgaaatgcttcagattaaaggaaaacaaaaaaatctgctggcctgcgctcggattgacgtttgccggactcatcgtctccatcatcctgtcattggtactgccgaaaaacatatatgaacacatgacaaccgcggcgggcctcatgcttctttatacgtggctgttcattttgttctcgggcaagaaactgctcgaaacgacaaaaatgggaaccgcacagatttttatcgcccttgtgctgattgtcgcggccgtctccgggacgctgtttgagaaatcgagccggcccggttttctggtcagcctttgttttctcgccgtcattgcgatcgtgacatggatcgtacaaaaaaagcagggacacagccctgccggatcatagcttatttcgtcggtttaaacagtcttttcaaataagaaaagggacactttgacacttgcgtctcatcatcacggaggaaatattgcttccattctaaattgtcttttcctccgtaccaccccaatcggggatgaagaggggcttcatcatacgcctctaagcgttttctgatcagccggctcatgtttcgtccgaacgcggttgaatcatttaatccttcgaaaacccatctcggctgaaacgccagcataaaaaacgggaagcttctgctttgtctcgcttcatgcgcaggcgtcgcgcacagaataaaatacggctcgccgtcaaagcagaactcccatttataatgttcagggtcttccggcatgtcttccggccagtcattcgggtcgcagccgctcagccggtttaaaaaagaccagaacagctcttcatacgcctcaatggaataatgctcagctaaatcctcaggcgtatcaaaaatcacaagcagcgacgcgtatcttccggtatcccttgagatctttccgtactcggacagcagcatccccacttcctccggggttccgtcttcgcggggatcacccgcaaaggatatccggagctgatctgtcaaaaatccctgacgtccgggaatgcacggaaacgtatccgctttatcgcctactttttctgatagaagctcaaaagcgattctctgccaatttggcagatccaataacttttcctcaaggcaactttttgtgtacagcccgcttgccatcggcccacctccagtatcgtcatgatacgttatgatggagataggcgatgggtgacagtccttctatttatgagatgagcatttgaatcccctgccatccgaaataaaacccgaaaacgatcaaagacacacccgccgctcccgtcagccagcggagcgctttttcatgaaggagatttctgaaagtgctcgcggcgaccgccatgcagaaatcccagatcaaaatgccgagaagaatgccggagctgtaaatcaaaagctgatttgcatcgaaggattcagcggttttggcgagaatgctcccgtatatgccgagccagaataaaatgctcagcggattggatagagaaataaaaaatcccgcgccgaatgttttgtaaaaagccggttttccttttccgcttctgacattcatggcttcccttatattttttaacgtttcgactcccgtataggtcagcacaaaaaaaccgaagagccacaaaaacgtttttacaaaaggagcggtcaaaaattgagacagcccgaaatagatcagaatcatatacagcccgtccgcggccatggcgccaagaccgaaaatccatgcatgccaaaagccgtttttgatgcctttgtcaatttgcgccgcattgaccgggccgacaggtgctgacaatgacagcccgagaacgatgtagcttaaaaagatgttcattggcttccccctcattcatgcaacttgtacaagttattcatgaatgggccgtgctatgatacattattttaatttctcaagctcgtcttccatcatgtccgtcgcttttcctaaaaaatcgaatatcagccgcagttcttcttctttatattgccggcaaaggctgatcgtggactgggataaggagctgaacaattgcttcacattcgcttttccggctgtcagcggcacgatgatcacccgacgtttgtcttcggggtcttttttcctcatgacatatcccgctttttcgagccggtcaatgagcgccgttaccgaacctgtgctgaggccggttttttttcccagctcgcctgcggtcatcgggcctgcttcatttaagatatcagctgatttcaaatcggtcggaaacagaccgagagattgagcggccgcctgatgaaacaggatcgtccttgtggccatcttccggaataactgtatcgcggtttcctccgtctcgcttctggtatttcttgttgacaactgacaggcctccctataaaatcaatttatcttgacgatcaagataattttcggcaaatctaatatgatcatagcaaatttaatgatcaaaagtaagtatgggaggaaaaagcatggaacaaacagccgcgaaggacgcctcgacgaagtttgtcgtcatcggtcttttactgggcattttaatgtcggctatggataatacaatcgttgccactgcgatgggaaatatcgtggcggacctcggaagtttcgataagttcgcgtgggtgacggcatcatacatggtagccgttatggccggtatgccgatttacggaaaactgtccgatatgtacggacgcaaacgtttctttttattcggtcttattcttttcttaatcggatctgcattatgcggaatcgcccaaacaatggatcagctcattatttaccgcgtcattcagggaatcggcggcggcgcgctgatgccgatcgccttcacgatcatttttgatttatttccgccggaaaaacgcggaaaaatgtcgggcatgttcggtgccgttttcggcctgtccagcgttctcgggccgcttttaggcgcgctcattaccgactccatcagctggcactgggtgttttacatcaacgtgccgatcggtattttatcattgtttttcattcttcgttattataaagaatcccttgaacacaagaaacagaaaatcgactgggccggcgcaatcacgctggtggtttccattgtcggtctgatgttcgctcttgagctcggcggaaaaacgtatgattggaactccgtgcagatcatcggtctgttcgctgtgttcgccgtgttctttatcgccttttttattgtggaaagaaaagcggaagaaccgattatctcattttggatgtttaaaaaccgtttatttgctacagcacagattctggcgttcctttacggagccacgttcgtcattttagcggtgtttatcccgatcttcgttcaggctgtgtacggaagcaccgcgacaagcgcaggctttattttgacgccgatgatgatcggttctgttatcggaagtatgatcggcggaattttccagacgaaagtgcggttccgcagtttaatgctgatttccgtggtcgctttctttatcggaatgctgctgctttccaatatgacaccggatacggcgcgtacgatgctgacggtattcatgctgatctcaggattcggcgtcggcttcaacttctcactgctgccggctgcgtccatgaacgatctggagccgcgttaccgcggaagcgccaactcaacaaactcgtttttgagatcattcggtatgacgctcggtgtgacgattttcggaaccatccagacgaatgtgtttaccaataagctcacagattcattcagcggcatgaaaggagcgggcggcgcgatgcagaacatcggaaatccgcaggacattttccaggccggcacgcgcgcccatattccgccgcacattctggatcgcattattgacgccatgtcgcaaagcatcacatatgtatttacgcttgcgctggcgccgatcgtcattgcggccgttaccattttgtttatgggaaaagcgagagtaaaaacctctcaggaaatggcgaaaaaagcgaattaaaaaaagcagtacatggcgtttgtcatgtactgcttttttatttactctgcgaaatgcggagcgagaatatctttcagcacgtttgcgctgcggctgaattgagcctgttctgtttcattcagctcaagttccgtcacacctgcgatgccgttccgattgacgacggccggaacgccgataaagacgtcgtttacaccgtattggccgtccagatatgtgctgacggttaaaatgctgttttcattacgcaaaatcgcttttgtgatgcgggcgaggctcattgccactccgtaatatgtcgcgccttttttctcgataatatggtaggccgcgtttttcacatcatcaacgatctgatccagctcgtcctgtttgtaagctgtatttttctccagcaattgctgcaccggcactccgccgatattggcgtgactccatacaggaagctcggtatcgccgtgctcgccgataatgtgggcgtgtacgttttgcggagcggctccgaaatattcgctcagcatataacggaatcgcgcagaatccagtgtcgtgccgctgccgatgacgcgttctttcggcaggccgctgaatgtccaagtcgcataagtgagaatgtcgaccgggtttgtggcaacgaggaagatgccgtcaaatccgcttgccattacttcaccgacaatacttttaaaaatggcgagatttttttcgaccagctcaagtctcgtttcgcccggtttttgattggcccctgcacagatgcacacgatatcggcatccttgcaatcctcatatgtgccgtaagacgttttgaccggatgaggcgcaaatgcctttccgtgatttaaatccatgacatctcccatggctttttctctatttacatcaatgatcacaagctcatctgtgatcccttggttaattaacgcaaatgcataactgcttccaacaaaacctgctccgactaatgctactttgttcactcgttcgttcatcatgtatgctcatcctccagtgtttcgtggtgtctgtttttatcttgtgaagtatttcacatttatattgtgcaatacttcacaaacttttgcaagtgaaaagtttgttttttggacaaaaaaatatcggtgatggtttccaggatgttgtcatcttttcagcgtgattgaagacgcgctgtccctttcccagaagcgggggtttgccggcacgctgatgtgatgatggccctatccattaatgcggaagataaccattcaaaccagaattgttatacaaaccattctgcacataatcaaagccgggctggttctgtccgggcacttgggcgctgccattgttaaaaatcactttggcgttagccgtatccgcattctcaggcagcgtcagcgtgtacattccatctgcattcttggtcatggctttccccggccacgatccggttaattctatggtcctgcctccatcatgtttatagatataagcatttacctggccccaatggtccggattttgatagccaatgatgttggtttgggccgggtcttttttgacaaacgtgtattcttgggttctcgctgcaccctcgccgttcgttccggttaatttgatgttgtatgtcgtgccgattggatcttctttcccgatcgttaatcggtctccatccttaaatgctgtctgctgcccattattgatttggtaaacggcttttattgttttcgcatttgcacgcagggtgaccgtcagctgatcattgaaagaatggactgcccccgtttggtaattctcaaggaagacatgaggcgcatttccaatgtcgtcaggataaagaacagccgcggatctggcattgatcgtacctgtcagtttgccgttcgctacttgaaatgaaccggcgccggccctattatcatacctgccgtcaggtaatttcgttgaagtattgatggtgacagaagacgatcctgcatttgccagcacaacgccttttgagccgcgctgattcataaatatttgattgttcccattcggattcgagagttcctcgggctgcccggccatttcattgtgaaattgattgaccgcagtgatcgcctgatctttaaataaggcgctcccgcgatctcctatttgactttttccgggaaatcttacaccatttcctccgccctcaggtctggaaaagaaaagaggcgtgcttcctgagcgggaaccaatcactgcccagcctaaacgaatatcgtcatcactcatccatgtggattcttcatcatcattggcatacgtatcatgtgattccacccatgtgactaacttgtccgcagacacgtcagatgcataatgggagatattcgacacactcagattacggttctttaaagcggatctgatggaatgcccgtagttagaagccgtcacattcatataattcgcataagcagtatctctggacgcgctgtcttgcaggatttctccgtattggaactccgccgatgtatttgtgatattcggccaaaattggctgccgtaattcccatcatccggaagctctatatgcttggcggcatcatagcggaacccgtctgctccgtcattcaatgctctttccaagaaacgtttcagataggcctgcacctcagtgttctgtgtattccaatcatacagcccaagcaatgaattttgagtgacgtcccatcgatccgaccaatttttaatttgtgtgtttccgtgggtccagtttggaatacgcttaatctcgtcagaaatcgcggcataatcgctggtggtatgattgataaccgcatcaacaatgacttttacgccatatttttccgcggctgcacacatgtccttaaattcttgttcagtgcctaagtaacggtttccgatttggtacgatgtcggctgatacagccagtaccagttcctcatgcttttatctccttggttcccttcctttacttggttaatcggagacgtctgaatggctgcatagcccgcatcacgaatctctttcatattttgtgttaacgtattgaacgaccaattccatgcgtgaaggatggtcccgtttttgaccgatgacgcggccacctcattcgatttgtttgcagtttcagcgtttgcagccgccgggcctgacaaaaccaaatgaaacagcaataaaaatccggcgaataacggcagtaaagaggttttgaatcgtttttcaaacatttttgacactccttatttcatttttgaagactgactgcggagtcaaaaattcctcttactctttcttcagctcctttcaactgttgtgaagactggagaattctgttaacgcttacatttcaacttatcacactctctctatcaaagcaacgtgacagagtgaattcaaatctatattcctatcaaataaaaagacttcccgctttcaaacaaaaaaagaaaccacctgtcaagatgatttcttttttatttcttttatcgctcttctgtaagacagcttcacaatgacataccgaagcaaaaacagaacgcctccgcagacgataaaaagaaagatcattttcagccaagcaaagaatgtatggggaaaccccctgtcgtacatcgtaatcgccgctgccgcaaaagtgaccgcaattgaatctatccgctgctgcttcacccgcttttgcagttcttctttggtgtctattctcggcatgagcattcccgacgctcccgccctgatacaataataaacaattataatgaagaaaaccgccaagctaccggcccattccctaaacggacagttcagaacaagtccgcgtacgatgatgtcaagcaaagacagtgtgcccacaagcattccgacttctgaccaaatcattcgttctttctctttcacactctcactctttccattcacgtttgaaagtctgttccgacgctgattcatgacttcctcccgtactattaagaatggcttacaactcccattatatcttgccgattcataatgataaaccgaaatatcattgacaaaaatgttaataagggccccaattgatcaggacgcctatgcaaataaacacaaggccgatgacaaaccaaatcagcgccagcggaatcatgaagcgaagccactttacgtacggaatgccgctggcagccagtacggccatcagcacgccggaagtcggattgacacagtttacgacgccttccccaagcataaccgcttcaaccgcgacctgtctcgtgatacccatcagatcggcaagcggcgccaagatcggaataaatacgaccgcctcccctgagcccgatgaaatcagaaaatgaagcagggcgctggaaatatacattccgatggcgcctgccatcgggctgaaaccgtgcagcagtgacgcaagtccattgactaccgtatcaagcagctttccatgttccaggataacggaaatgcttctcgccattccgacgatcagcgcgccgtaaacgagcccctgacagcctgtaataaacgttttcgcgatatcatttgccgccattcccgcaatcaggccggacacgattgagataaaaatgaacacggcggccatctctgaatcagaccagccaagagtaagcgcgccgtacaaaaagccggcaagcgacaaagccgcgacagccagaatcaatttatggcggacggtaaacgggacatgcttgtcctccggctcagaaacctgcgggagtgaacctgccgccggaaaccaatcgtcccccagcagactggcgtcctttgcttttctgagttttctcgtataccgataaatatataaaatagatgataacagaaaacaaatgtagacggcaatccgcaggccgataccggaaaacagcggcagctccgcgatgctttgtgataacccgagcggtgaaggtgataaaatcgtagcgttaaacccggcatagcagccgatataaatgacggccgctccggccacggcgtcccatttcagcgagcgggcgacgatcaggccgatcggaataaaaccgatcacggaattaacgacgatgccggttgtgccgaggatcgaaaacagagatccgacaatcgcaataaacagcagctgttttgtgcggaacgtactgatgacattactgatcaatccattgatggcgcccgttttctccaaaatcgcaatggtgccgcccgtaaacaggattaaaaaaatgatcggcgcggaacttgtcatcccttcctgaatcgcggtaaaaaaagcgatcgggctgacaggagactggtctaaagaatgatagcttcccgggacggcggacgtcacactgcccttcgtcaccctgtcaaattcccccgcgggaacgatgtacgacgctatcgcgcatagtaaagcgacaatgaacagcagcacataagcatcaggcatcacaaacaatttcttctttttcaatacaggttcggccttcggcacagccataccatcaccatcccgctttaaatttataaactattcagaaaatacagatatgtgctatattatatacagaccgattgcctgttttcaatatcaaaaataaaaaacagacagcttttgaaggaggacttacggcatgaacagactcacagcgcatgaaaagcaagtcattatggatatttttgaccacctgcacgccaatcccgaagtaagctggaaagaatatcaaacaactgaatatctgactgaaaaactgaaagaggccggctgccggacccgcacgtttgatgattgtaccggtgttgtcggcgaaatcggagaaggctcgcccgttgtggctgtccgggcggatattgacgcgctgtggcaggaagtggacggtgtctttcaggcgaaccattcatgcggacatgattcacatatgacgatggcgctcggcacgatgatgcttttaaagagtcagccgaaacttccgaagggcaccatccgctttatttttcagccggcggaagaaaaaggcggcggagcgctgaaaatgattgaaaaaggcgtactggatgatgttgacttcttatacggcgtgcacgtgcgccccgtacaggaaacggcaaacggccgatgcgcaccgtccattctgcatggctcaagccagcatatagaaggactgattatcggagaagaagcccacggcgcgagaccgcatctcggccttaacagtatcgaaatcgccgcccttctcgtccaaaaactcagcttcattcatcttgatcccggcaccccgcattccgtgaagatgacaaagcttcaggcaggcggagagagttccaatatcattccgggaaaagcatcgttcagccttgatctccgcgcacaaaccaatgccgccatggagaaattaaccgccgaaaccgaaagagcctgtgaggcggcggctgccgcattcggcgcaaagatcgaactgcaaaaagaacacagcctcccggcagccgagcgaaacaaggaggcggaagccatcatggcatctgcgatcagcagcattctcggagaagaacatctggatgaacctcttgtgacaaccggtggagaggattttcatttttacgggttaaaggtgccgaacttgaaaacgacgatgctcggcctaggatgcggtctggagccgggacttcaccatccccaaatgacatttgaccgaagcgccatctttactggcattgagatattaacggccgccgtcctcaaatcgtttgaagcataaaaaaaagcagcccgttacagggctgcttttcctcattacttcttcaaatcttcaattgaattgacgtttttcatatactgaggaacgaccagacccatcttgacgcctgtcagactcgttcctacatcttcatatttgcctttatatttagacgcatatgccttatgggtattcggaagccaagcagacaatgacgcatccgcgctgcctgtcgcaatcgcagtccacatcggtcctgcctccacttgcgtcagcttcacgtcataaccgaggtcttgaaatacttttccgattacattcgtacttgcgatttcactgtcccatgccacataagccaggttgattttatcccctttaactttatgggcgccttttgtccattgagccacttgatctttgtgttttttcacatattcagctgcggctttggccggcttttcgccttcctcaacggcaatcatgacttctcccatatcgtcctgcgtccatttaaactggctgagaactttggccgcgttaggctgttccttactgaagccggttcttgtaatcgtatgaatctgctcggcagttccgtacgtttttttcggatcatcaaggaacttcagcttgtatctggagaacatccagtgcggcgtccagcccgttacaatgatcggctttttccggtcatatgatttcttcaatgtcgccgtcatggcagcacttgacgccgtgacgacattccagtctttcaatccgtaatccttcacggcctcatccgtcagggccatgatccccgatcccggatcaataccgataatggttttgttcacctggtccgcagccgttgccttaccatcagtctgcgaaccgcaggcagccaaagaaagagccagcgcagcggtaacgccgacaccgatgattttcttaagcatcaggcattccccctgctcttcttcttcactttaatgttttgcgtgatacggtcgagtgtgatcgctacgataacgatcgcgatacccgcttccactccgacaccggttttcaattgtgtcacggcgctgtatacttcagaaccgagacccggcgcaccgaccatggccgcgataacgaccattgacaaagcaagcatgatgctttggttaataccggcaagaattgtttttgtggcaagcggaagctggaccttgaacagacgctgagacgtcgttgaaccgaatgcttccgtcgcttcaatcagatcagcgggaacctgtttaataccgagaaccgtcatgcggatcgtcggaggcatcgcgaaaataacagatgccacgacgcctggcacaaccccgatattaaagaagaaaatggcaggcagcagatatacgaaagccggcatggtctgcattaaatccagaatcggtgtaacaatgcggcggaccgtttctttctgagacgcccatatgccgatcggaaccccgataataatggaaatcaaaacagatgtgacgacaagcgccaacgtttgcagcatcggcgaccaatagcccaaataatcaataacaaggaatccgattaacgtaaagagtgcaattcctctcgtactgatccaccaagcgagagctgcaaaaataacagtcaataaaatagacgggatgaaacccaaaccgctcacaatcgcgtttacgaaagcggccaaaccgtttgagattccgtcaaagaaacctccgaacgtcatggtaagccagtcaacaaaccggtcaacgatatctgctaacggaattctaggcaatctgtccatttacttcaccccctgaacagaagaatcctgagcttgttcagcagaatcttcaacatttatataatcgttatttcctgaaagcgcgccgattaatgcgccttttacgacaatgcctttcatgcggtccttatcgtccgtgacggcgatcggaatattcgcatcagacacgacatcgaaaatttccgtcaagtacgtgctttcgtttacagtcgtaaattcagtatttagaatatcctgaagcgataagtcggattccaccgcttttttcgcatccgccgcgtgaatgacgccgagaagctgtttctgtttatcaacggcgtaaatagaagaaataccgagattcttcatgagctgcagcgctacacgaggccctttgtcaatccgcacggtttcagcgcgcttcatgatgtgacccgctgtcagaactttggataaatcaacgtcctcaacgaatttctcaacgtattcattggacgggctcatcagaatttcttcaggcgtcccgatctgaacgatgttaccgtctttcatcagcacgattctgtcgccgatgcgcaatgcttcatcaagatcatgtgtgatgaagatgatcgtcttgccgacagagtcatgaaggtctaaaagctcatcctgcatgtctttgcggatcagcggatcaagcgcactgaaagcttcatccatcagaagaatgtcaggatcattcgtcaatgcgcgggcaagtccgacacgctgctgcattcctccgctgagctgatcagggaattggtgttcaaagccttcaagaccgacaagtttaagcgaatcaagcgctttttgctcacgctcttttttgtcgacgccttggagctccaaaccgtattccgtattttcaagaatcgttctgtgcggaaacagcgcaaatttctgaaagaccatgctgatttttttccggcgcacttcccggagctggtcttttgacatatttgttatcatgtcaccatcaatataaatattcccggcagtcggttcaataagccggtttaacagccgaactaaagttgatttaccgctccccgatagacccatgatgacaaatatctccccatcatatacatcaaagtttgcttgattgacaccaacggttgatccggtcgctttcaggatctcttttttgttttttccgctggacagcatctgaatggctttttttgtctgttttccgaaaaccttagatacattttcgacttttatcttaattggtttctcatccaaattcatattttccctccataataagcaatctttaataccgtaacacgtttgtaataagtcaaacaaacatcataatccctttttatattgtatcattactttaaaaacatccctgtgtcttattttcctctggtatgcttctaaatactctctaatcctccttattgaggataaattataaaggaaatcgggcttttatcaggcttgagaacgtttccatcgaatgtgctgcaaactgatttcctatcctttttttacaaatacaagaatttttttgcgacattgtcccggaaaaagaagttttcgcctcctgaaaataaggaatattaaggaaaaatataggtctgtcaacagacagctcactaaaaaagcaccccaaaagggtgctcattgcgcaagctctgtctgtttcgtttcttttccgagaattagaatggtgatgacggcaatcaggatggccgcacaaaagacggcgaaaatcactgtaaacgaaacgttccgggctgcaagcgatccgacgagaagcggaccgaaaatgccgccgactctgccgaccgccgccgttgtgccggaaccggtcgctcggatcgccgcaggatactgctccggtgtataggcgtaaagcacgccccatgcgccgagattgaagaaggacagcagcatgcccgctgtgagcagcatggccaatgaatccgcggcaccgaagaaataagcgctgcccgccgttccgagcaaatagatgactaagatggtcttccgccccgctttttcgatcagccacgccgcagagaaatatccaggaagctgggcaagtgtcatcagaaggacgtattcgaagctctcaatcatgctgtagcctttcatcagcatcacgctcggcagccataaaaacatgccgtaatatgaaaagacgacgcagaaccaaacgacagacagcagcaccgtcggccgaatatacggtttcgtccagacacttcccgcctgcccgcgtatgctttttttctgcggcaatgcctgatgcgccggtgattccggaaggcttttccgcaagtacagcgcataaaacgcggccagcgccgttaagagcagcgcggcctgccagccgaatgacggtatgacaaagttggaaatcaccgccgcaagaagccagcccgcggcccaaaagctctcaagcagcacgatgatccgtccccgcttttcaggaggggacgcttctgacacgagcgttgaggcgacaggcagttccccgccaagccccattccgatcagaaaacgcaatatgagaaaaaccgtcaatcccgttgcgaaagcggatatgccgcttccgacagaaaagaataacagcgtgatcataaacacttttttccggccgatcctgtcggccagcattccgaatacaaaggcgcccgctgccataccgatggaattgacgcttccgatccatttcatttgatcgggcgttaaattccaatcagtgtgaagcgcggcgataataaacgataaaattccgacatccatcgcatcaaacagccagcccattccggcaatcgccagaagttttcgcggagtgacggcaggttgtttgttcataagcagcacctcaaatcgaaaatgattaccgtataagtttacacctgtctttacacattgtcattatcttttttcgcaaaaaaaccccgcttgccgtaagcaagcggggtgtgtgttaattctttaagactgcgtttttaatattatcctgaagctgttgaatccgtttcgcgccgtcttctctgatacgtctgttctcttcctcgatctgtttcgtttcctgcataccgctgacgatcgtgttccaagacgtttcaatcgtctcaatgtcaatactcggacggcctgccatacgggcgatctccacgctttggtttgaaatattttcagcgttgcgcttcagcatttcattcgtgcggcggtccagctcgctcattgaatcagccacaagcttttgccgtttgactgtgacagcctgaatgatgccgtttttgaaaatcggaatcgtaatgacgaaagcggaattgattttcccgatgagcttcgtattcccgcgctgaaggaggcggatctgaggcgccgtttgcagcgccaccatccgcgccatatctaaatcatacacacgctcctcaagcgcctgaagcccgtcacgaagcgtatcaagctgcatttgcgcaagctggtttccgccggccgctttttcttcataagaaggaatgagcgcctgcatttcctcaagcttcatctgcccggcaacgacatacttttcaagctccatgtagtagttaatgttgttttcatacatctcttctagcgtatggtttgtctttgccatttcatctttgtattttgaaatttcgacgtggattttttcaatttctccgcccagggtgcggtacttttgaaaaatcttttcaatcatgctgttgccgcgtttgaacattttagcgagaaatccttttggttcatcgaaatcatttttgtcaaaacggtccataatttttccgagctgcgtcagcattgtgcctgaatccgtgacacttgttgttttcatcatatttaagatgcggtcggagaacttcgagatttcaactgccggttcttttccgtactcaagcagctccatttggtttttcacgtcaatctgctgcgaaatgcgctgcacttcagggtcttggcgcagctgcaccctgatgtcatctgctttttgttcagaaatctcttcatttttatcaagaacaagcggattttgattttctgtcatgtttatttactctccctgcttttgcgtaatggttctaaacagctttcttacgagtgacggctccttatattcctgccgaaacaccatgtcctccagccaatggacatcaaattggctttcttcaatatagtgctcaatatcttgatgccccggcggattatacaagatgatatcgacgccgaatttatttaaaaacaacagagcggcggcgtccgaacgtgtgagttcgccattttgttccgtatgatataaaacgagtttcggaacggtttgggcgtaatcaaacgtctgaatcaattgcagcagcgaagcgggcaggttcgtcgcctggcggaacaaatagattgcggaatccctttcctgctccccgggcaaagccttcagccctgggtttctgcacatgtcagaaatcacattggcgatggcgttctgcacacctgaaggcagatgcttgtactgccagatgttgcttcttttcagcctgtccgcgtcaatcgctccttcttcgttcaaaacctgagtgtagtgatactggtagttggctttcagctcttccgtaaacggaaaactgcggatcatgtgtgtctcctgatagtccgcggcggtatggagtctgttccaatattctttcgtatctttggaaacccccatcactttcgcaaaaaggttcggaacggccacccgctccctgtccgctttaaattgcggccggataaacgcccgctccttcgcaatgagaaataactcatcatacgtcgttttcaatgtcacggactgcggggtatgatccctgaattgccaaggtttatacatcatggattcctcatggttcagcacatgctcaatttctttcgttgaccggtaggccgtcgtggacgttctgtccggcttttctttcgggaatggctcaaggccgcctgctgcggggagctttatcacaaagctgagttcctcatccggatcaatcaagctgaacggatcttccgcagccggatgaaacaataggacgtcacagccgatcagcatgagataatagagaaaatagagctggcttttggtagcgtctccataccacaccaccttcggcatctcacgctctatatcggcttgttcgagccatggattcaggtggttcagcgaaaactttgacacatccaagagcacacgccggaaatcgggatgattcagcccgttttcatgccggtccgcaaaggtttccaaaagcgtcataaacgcggttctcagccggcggtgcataagcggatcagcgtgtttggcaagcagcctgcccccatcgagaaacgcgacaaatctggaaaccgaaagccctttctctttttgattgaccgaatggatgtgctggagcgcctgaaacgtttcaggcgcgatggtcttatccagcgtctcgcttaacacatggatgttttcatgagaagacagctcgaaaagcttattgtaatactccgtctcatcataaggagtgcccaaaatccggacggcaagccgggtaaacgccagcccgttttcccgctcgtaaccgggacgttccggcagcggccgcatcagaaacgtttcccagtcatcgttttccggctcggcctttcggatcaccaattcttcctgcctcatcatcttcctcctttctcttcatgattatcggtacaaaaaaggaaggaaatgaactctccctccttttttgttttattcttctttagatgcagccgtttgctcctgaacctgcttttgtttgttgaaatagtggataataaacgttaccacaaacgcagcgatgatgattccgaagaacacaacgtgcggcatttcataatcaaaggcgctcgccgccattttcacggcgataatcccgatcagcacgaaagccgtgttttcaagctcagggattttatcaattaaaacaaggaatacttttgcgactgtacgcatcatgagaatgccaagcataccgccgatcaagagcacccacactttttccgataccgcaaacgcggccaaaatgctgtcaacagagaaagccagatccattaactcaactgaaacgacagtggcccagaaaattccgaacgtacggaccatccatgaatttttcttcatgccttccgtatcatcatcaccttctccgatccagaaatgcttaatgacgagccaagccaggtacagcgcgccaagcactttgatccaccagaacttaatgagcagcattccgatcccgataaagataaaacggaaaatatatgccccgaacaatccgtatgttaatgctttcttccgctgtttttccggcagatgccttaccataaccgcaagcactaacgcattgtcggccgacagcagcccttccagcagaaccaaggaaccgatcagcccccatgatacagggtcagtcagcacctcaccccacattttccaatcaaaaaaggaagcgtaggtcgacataatatgatgtagaaaatccaagttttttcctcctatttagtaaaacggtaatttcctgcttacacctgcaagccgtaattccggcaaagtgatgccagaccgccggaaaacccgctgccgatggcgttaaacttccactcagccccatggcggtaaagctcacaaacgacaaccgccgtttcaatcgagaagtcctcccctaaatcgaaacgaagcagttcattctggctgttttcatcgacgacgcgcacgaacgcgttagacacttgtccgaaattttggccgcgcgctcccgcatcatgaatcgtgacggtgatgccgatcttttcaatatttgcgggtatttttgagaagtcgacgataatttgttcatcgtctccctcgccctcgcccgtccggttgtctcccgtatggatgacgcccccgcttgggtgttccaggttattgtagaaaacaaaatcaagatcatttacacagttgtcatgggcatcgacaagaaaagccgacgcgtcaaggtcaaagtcatgccctccggagtacttgttcgtatcccagcctaagccgatcaccgcttttgtaaggccggggttcgtttttgtcagatcaacacgctgtcctttcgataattgaatagccatgtgccgtcctctcccttctgtgtttgatatggttcagccgatttgcaggccgtaatctgtcgcaatacgggccagtccgccttggtagcctgagccgatcgcggaaaatttccattcgccgttatgtctgtaaagctcccctgcgataatggctgtttcaattgagaaatcttcagccagatcgtagcggatcagctcttcatttgtctcttcattgacaatacgcacgaacgcgttggaaacttgtccgaagttttggccgcgcgcttccgcttcatgaatcgtgatgacgaatgaaattttgtcaatagccgcaggcaccgcgctcaggttgactcttacgctttcgtcatcgccctcgccctggcctgtcaggttgtcgcctgaatgtgcgacagagccgtttccgccttcaagctgattatagaaaatgaaatcatcgggcgacgcgcatcttcctgcttcatttaatagaaagacgctggaatctaaatcaaaatcatgtccgccgtcgtatttgtttgtatcccagccaaggccgacaacgactttagaaagacccggatttgttttagtcaaatctactttttgtccttttgccaatgaaattgccatgtgtgcactctcctttttatcgtttaggcgtatcggttaacgatatcgccgatttttgtatcgtttgtgccttctcctactgcggcgaatttccactcgccgtcctcgcggtagatttcagccgcgatcaggctcgttctgcctgaatagttatctcttaaattgtaagtcaccagttcttcgcgattagcctgatcaacgacgcggatgaacgcgttttgaatcatgccgaagtcctgttttcgtctgacgcagtcgtaaatattgacgacaaacacaagtttattaatctgagcgggcactttcgccaaatcgatgagaatttgttcatcatcgccgtcgccttcacccgtcaggttgtcacccgtatgtacgacaccgccgcaccggcttttcagattgccgaaatagatgacgtttttgctgtctgtcattttatcattttcaagcatcagtacggaagcgtcacagtcgatattggcaccgcctccgccgaacagctttccgaaaaagcccccggatgatacagggtcccagccgagtccgaccagcagttttgacaggccggcttttccttttgttaaatcaatccgctgtcctttttgtaaagagatcgccatatgattcactcctattctgtaagggtgccgctaagcacgccgcaagtgcgcatttttactaaattccgggacaagaatcccggtgtttattaagatatacgtcttttattatatcaaagtttcataaaacataagaatttttggcgaaaaacggcgaaaaatcacttcctatattctccttcgttccggagagaatagagaaaacaaagaaattgacggggactgaacatttttcctatccttgtatcaatacatgtcaggaaaggggcagacgagtgattgatttaagcatacttgatcaggcgcccgtatccaaaggaaacgggccgcacgagacgctccgccgttcagcggagctcgcccgcctcagtgaaggatggggctataagcggtactggtttgccgagcatcacggcacaagagggctcgcaagcgtttcgccggaaattatgatcgctcataccgccgcagctacaacatccatccgtgtcggatcaggcggcgtgctgctgccgcagtacagcccctataaagtcgcggaaactttccgtcagcttgaggcgctgcacccgaaccggattgaccttggggtcggacgctcaccgggcggcacaacgaaaatccggctcgccctcacagacggggtaaagaaaagcatgaccgagtttaacaggcagcttcaggatttatcatcctttctgacagattcagttccctcggaccatgcttatgcaggaataaaaacagcgcccttgattgaaacagccccgcagctttgggtgctcggcctcggggaaaacagcgccagacgcgccgctcttcaaggtgcgggctatgtcttcggccatttcattaatccggaacgcggggaaaaagcctttcagatctatcgggaccatttccgggcctccgcccatttttccgctcccgcctcgctctgtgccattttcgtcatatgcgcggctacggatgagaaagcggaagaactcgccttaagccaggatttatggcttcttcgtgtcggaaaaggcgccgacagccgcgtgccgagtgtggaagaagcgaaggcttatccgtattcgccggaggaccgtaaacagatagaagaaaacaggaagcggatggtgatcggctctcctgccgcagtgaaacgccgtctgcttgaactttccgagcggtatcagacaaaagagatgatggtgctgtgcaacgtctttgatttcgaagcaaaaaaagagtcatatgagcgtcttgctgatatatttctgtaaaaaaaaagccgtcaaacggagcagcagatgagactgctgcaccgcttaacggcgattttttcgttcttttccttttttaaacgcattccaaatcccctgcagcgtaaacccgagcagaagcagaatgattaacagtaaagtgattgacggccccggaggcgttccgagctggtacgaagacgtcagccccatgaacacactgaaaagagaaataataatggctgccgcaaacacccatttaaaccctttggcgatacggattgcaaaagccgcgggcagtacgaggagcgcggaaacgagcagcacgccgataatcggaataatgaccgaaatcgccagccccgtcacgatgctgaatgacattgacaggaggtttgtgttaatgcctgatgtctttgccgtcgcctcgtcaaaggtaagcagatagagcggtctgtttaatataatgaaataaagcaggatcaacagggtaattccgccgataatatagacctgctgctggctgaccgtcacaagcgatccaaataaatattgatctatgctcatcgatgcgccgccttttgacaggctgatcagaaacatcgcaaacgacagcccggccgccattaaaattgcgatagatacctctgaatatgtacggtacgcccgccgcatgtattcaatgccgatcgctccgatcgtgacgacaacgatgctcgccgccgtaatattggtactgagaaaaaaaccgatggccacgcccgacaatgaaatatgagacagcgtatccgccatcagcgcctgtcttctcagcacgagatatacgcctaatatcggcgccataattccgatcatgcttcccgctagaaaagctcgtcgcatgaattccaagtcaaacatttccatccgcctttttcccccctctcaagccgtatgactttatccagatactgctgtacttcgttttgttcgtgtgtcaccatgacgacggtgcggttgtgatttttcacctggtggtgcataaattcgtagaacccctgtctgctttcataatcaaccgcggttgtcggctcatcaagcatcagcagatccggattgctcgcaagcattctcgcaatgcagattttctgcttctgtccgccggataaatcgccgattttccggtggcggaaatcccacatttctaccatcttcagcgcgttttccacctcgtggtgatccgtttcgttcaatcgtttaaaccattttcctttcgtataacggcctgattgcacaagctccagaaccgtgcttgggaatcctgcgttaaatgaagaaatctgctggggaacatagccgattgtcagacgttttccggctgcgttttttttactgatctcggccgttccttcccaaggtctgagcatgccgagcatgactttcatgagcgtcgattttgacgcgccgttcggtcctgtaatgccgacgaattcgccgcttttgatttccagcgacacgccgtcaagcaccggtgtatgcgaataaccaaaaacgatatcttttaatgtaacgagattcatgctgaccttcctttcccgcatagaaatagtgtgcaccccgcggcgcacactatgttatttaaccaatagcgaatctttcagtgcatcaaggtttttctccataatgtcgatataaccgatgcctttatcccgttctttttggcttaaaccttccagtgtattgagcacttccgttttcgcgccgatttcaccggcaagtgtatctgcaactttaggcgatgcaacttcttcaaagtagatgatcttcacatcatgctttttggcaaacgttttgagatccgccagtttggccgcactcggctcttcttcaggagaaaggcctgcaatcgcgacttgttttaagccgtattctttagcgagatagctgaatgccgcatgctgtgtgatcagttcttttttcgccgctttatttaatgttgtacggtatagtttatcaagatcctgcagttttgcaatatattctttactatttttctcatagtatgctttattcttcgggtcctgttttacgatctgcgccgtaatggttttgacctctttttgcgcaagaaccgggctgagccacacgtgagggtccatgctgcggctgtggtcatgaccgccgtgtccatgttcctcttcctcttcatccgaaccttcgagtaagtcaattccttttgacgcctttacaaacttcgcatgatcagagctcatgcttttttccgctgaaggaacccatgtctccatatattcgctgttgtatacgaaaagatcggcgttttgaatgccggcgatatccttcggcgtcggctcccaatcatggggttcgaccgaagacgggatgagaatgtctacatcgcctttgtctttgacaatttgtttcgtgaattcgtacataggataaaaggtcgtcacgacgtgcagtttgccgctttttgaagaacctgacgaaccttttgaagatgaattgccgcagcccgccgcgattaaaaagcatgccgcaatgacaatgattccgctccattttttaaacaagccgtttccccctgttctgtaaatcagaatgatgacgatttccaaagcgtactttctcgttcatttgttacctataccataataaaacgaagtaattacgttttgcaagatatttttttctaaattgatatccgatttacctaaaaaacccccgccatgtatgggcgagggcttcatatcacatatcaggcaagcagataaactcttgtttcgtaagggcgaaatgtgatgcgggattccgtgccgccgtcattttcatagttgctgagaagcagctcggccctttcaggttcggaaccgtccggccaataaaaggcggcttcttctttcgatacgttgctgatggacatgagtttttgtccgtttgcctgtctttcatacacaaacagctgcgggtcatcaggaagcagcagcgtgtagctgccttttatgatatcagcatactgttttcgcaggcggatcagttttttgtaaaagttcaatatagaatctggatcatcctgagcctcggccgcattgacggttttgtaattgggattgaccgtgagccacggttcgccctccgtaaatccggcattcttgctgccgtcccactgcatcggtgtacgggcatgatcccggcttttcgccataatggacgccatgacttcttccctgttgcggcccatttcaaatacccttttatgatacatattgacggtctgaatatcttgataatcctctattctgtcaaacggagcgtttgtcatgccgatttcttccccctggtaaatgtacggcgtgcctttcatgaaataaagcagggcggcaagcattttggcggatgctttgcggtatgtgccttcatctccgaaccgtgatacgatccgaggctggtcatgattgcaccaatacagcgtattccagcctcgatgttccagtttttcctgccagtctgtgagcactttcttcaaatcggacagctcaagcggttttacatcccaatgctcttggcccggcttttgatcaagctccatatgctgaaaatgaaaaatcatattcagttcatgctcatcggttcccgtgtagaccagcccttcctcaggcgtcactgatccggcctcgccgaccgacatcacgtcatatttggaaaatacctctttcgtcatttcttttaagtaatcatgtatccgtgccccgtttggccggaaaggcttcggatcggcccggcgggcgatgtaatcttcatatggcggcaagtattctttttttgacaggagatggagctggtctatacgcaatccgtccacgcctttatcgagccaaaatctcatcatctcgtacactgattgccgaacctctggattttcccaattcagatcggcttgtttgacggcgttcatatgcaggtaatattcgcccgtatgttcttcgtactgccagacggattgaccgtaatccgacacccaatcggtcggcggtccgtccgcggtgcccggccgccaaatataatagtcgcggtatttgctgtccggattcatttccgcctctttgaaccagggatgctccgtggaggtatgatttaagacgaaatccatcacaagctttaatccgcggctgcggcattctgtaagcagatcgtgaaagtcctccatcgttccgtaagattccataattgcttgatgatccgtcacatcgtagccgttatcgacgtttggcgacgggtaaatcgggcagatccatatcacatcagcgccaagttcttttatataatcgagacgcgcgataatcccccgcaggtcgcctatgccgtcgccgttcgtatcttgaaagcttcgcggatagatttgatagacaacggcgtctttccaccagtcattcgccatcttgcgatccccctgttttttagaaaaccatttcctttatgaccctgctctaaacaaaaaagagaaggtttcccctcctcttttatccttccagctgagacggataaagcgtcatgcctccgtcgacgaaaagtgtcgttccggtcacgtaactcgcttcttccgacaccatccatgcggcggccgcggcgacttcttccggtttgccgaaggcgttcatcggaatttttttcagctgagcttgtttatgtgtttcatcttccagatccttattggactccgtggcgatcgtgccgggagcgatggcattcacccggatgcctttgtctgcgtaattgagcgccatcgtttccgtcatcattttgattccgcctttggatgccgagtactgcacgttttcaggacgcggtatttgctgatgaacgctcgatatgtttaagaccgttccttttttgccgctctcgagcatatgtttcagtgccgctttcgcccccaaaaaggtgccggtcacattgacgtcgatgaccctttgccaatcctccaggctcatttcatggggcatcgcttcggtcccgttaaaaccggaattgttgaccatcacgtccacacccccgaagtgctcctgcgcggcatgaaacagcgcctgaatcccttcttctgaggatacatcggcttttacggtgacggctcggcctcccgctttctcaatgatgtccgccgcttcttccgctccggaggaatcaccgaggtaattcacaaccacattcatccgctccttgccgaagcgttcggcaatggcctttccgattcctttcgaagaacctgttacgattgctgtttttccctgtaaatcctgatacattgtctcttttcctccctgatgttaatacagagcatgtacccggttttaatcagctgaaaacaaaagagatcataaaaagaacgatgaaaccgaagctccctcgttctttttttcattatgcgtagttgttcatttgcagccttttttgcacgccgacaagcctgctgaaaaaataagatgccgctttgtagttctcccgtttatgaaagaaatgagccgcgtcctgaagcagttcctctgtgtcagccaacagctcttttgattccagaatgtcaaaatactctttgagcgaatcctgtccgccttccccctgataaagctctttaatcagacggaatttcgtcatatagatctcatcttcccactccgcagcgcttctcatgccccgcgcgcagctggcggcggcttcactgtatttttccgttttaaagtagatatgtgtgagtgaaaaaacagcctggatgacctgccggaagctgtgtgcttcaaatccggcagccgcccgttcaaaatcctccgccgccttgcaaaagtcacccagactgtacatacagtgcccgatattataataggccgcagcaatcatatattgatcatcaagccgctccgcgtgttccaaggcgcattcgaggtattccagcgcttttttatgctgctgggcgtccatcagatttccggcaatgataaatttgcactgcacccttctcattccgtataattcatacttcttgtaaatatcaagcgcctgccccgcgtaattcatcgaaaagaaagtctgcttgatatgatagtacacctcagaaattttatacagaaactcggctttctctatgtcatcttccacatattcaagcttttcctcagcccgcttataatgagaaatcgctgagatgaagtttttctgcttaaattcatacattcccctgaaatagtaaaaataatattccagtaagccggtcagcttttgctggttcatctcaatctcagtgagcatttcagagaacggaggctggcagtcgccgtctttcatgggttttaatttatccagcatgatgcggtgccgaaattccatcaatgaaaaatacaacaataaatcctggttctcttccatatcttcgagttcatattgaatctcccgcttcagtgcttcagctttatcggcttcaaacgcgcggatcagcttataccattcattcatctttacggccacttcttcagatggaatcttggatttcatagatttgcctccttcctccggctactaattatgttatattttatcatagcaaatttatggcagtgagcaaacaaagattttaatcaattaaagaaagagagaattcaccatgaaacgaccagtcagaattgcgctgcttttgatcctcttcttttccgcagacctatgtttttcctatgtgcagaaagaattgaggccgcagacggcattacaagatagagccattccaagcgctcttcatccgctcgtgaggcagaatgcggagctattgcagacggccgctctgaaaaaaggcatcaccgtcgttatcacagagggtttcagatcaattgaggaacaaaacgaattgtaccgtcaaggacgttcaaaaaaaggaaatatcgtcacctacgcaaaaggcggggaatcttaccacaattacggccttgcgatcgacttcgccctgcaaaaaaaggatggaagcctgatttgggatatgacgtacgacggaaaccgaaacggcacgcccgattggcttgaggtcgtatcgattgccaaaacgctcggttttgattggggaggcgattggagaggctttaaagattatcctcatttacaaatgatccctggctaataaaaccttttcttttttcgcttttgcgcatcaatgtacggaggatagacaggcctgtacacaagcttatatccttcattgccggacggcgtaaaatcgcgctgccactccagccgcagatggaaatcggataaaaaagcggcctttgcttcttcgggagtaacggccggcaccggattgatcttctccagctgctccgggtcaatgtcaggcgccatgtaagcttccacaagccccgttacgggactgacaagtattctcgcagcgccgaaccgcagcggaatatcctgatgccatatggaaaaatggaagcggaacctgccccttccgtccgttttcagcgggttcattttaaaaaactcgtccgctctcggataaagcttgtataaaaattgaagcgcgacggcctcacactcttctgcagaataaaaggccgggccctgatgctcaataaaagatttaaaggctgtcattttccctgtctttttgtccgttttcatcttcattgtatttttgttgctgctttcaaaatagctttcgatactcaaatctttccgttccggaaccgaccctttccgccatgtcgttccgatctcatccccgagatcacgccggcgcgtctgaaccatatccgcggtaaaccccattaattcatccaggctgatttcccgtttatgttcaaacgcgggaagcggttttgccggctcattcctgtcttcgcaaagctgctgatccggcacgatatcatcttcaccggccggatagctgtaagccggcagaatcggttcatagacgagacgcggtattttctcaaaattgaccacatcatagacgagactgaatgtcagcacactcatataatgcgagacgactttttcccgatcgacgaatgtttccggaacgggcgcttcacccttatccccgtaatagataaactgcacgacgaagccgctcctggttacatcaacgaaaaaacctgaatcgggaagcggccggccgagcactttttttgtatagataaatcggatgcacccattgcgttcttccctcgcctgaaaggtgaaattcataaaagtaagcgggcggtgtctcgccgcaaaccgaagagccgtcagctttaattcggcttctgacagctgtatgtctgaattcggacagtcgttgcgtgaataagtaagcaaagatccgtcgtcgcccagctcaatcgtgaccgttttatccggctggttacgatctttccatatataataggctttcgttttttgtttttcatcataatcttctatttcaagctcatagtgcggcggtatgttcccgatttccagcgctttttttctcagatgttctttcagcaatggggtcatcctttcagaagagtgtataaaaaagaactgttttttattatataaaaacgcccttatccttttaaagggaagaaagtgccttttatgtgtctatttttagcaaagagggaaaagagccgtattcagagcggcactttttcatacaaatgtcacattccctctgaaagccccgggacgaacgcccatgaccttcagcctattaaactcgtgatcgcttctcccgtatgagcctcaataaaccgcgggaaaaccggtttgtatacgagcctgtacacttttccgcagctgtcgtcatcgtaacaacgatcccaagcgagctctgctttgatggcccggcggatcgcatccttcgcctcttccattgtcaatgaaggaacgggatcgatttcctcgagctctttcggatcaatttccggcggcatatatacagtgacaagacctgtctttttgctgacacagattctgccctctccgaatcgcaaatcaacaccgcccgaacaagccttaaatgtaagccctgcgttttctccttcatcatccggttcatcatattgaacccggaaatactgatccgcttccggaaacatggcgaataaaaagcggatggccatgtgatggcattcttcctcggaaaacaccggttcgccttcactatgtataaatgacatcactccggcgagccggcccgattctttatcatgcattgttttcaatacgtgttcactccgctctttgaacagactttctaagcttttatcttcccgtacggattttgttttttcaggacgccagccaatgccgatgcggccgtctccaagatcgctttccctctctttataaaaaccgtcgtgcagcccgatcatgtcattgatgctcattttttccgcttcaggtgcagggcgtgaaatcgggacatacggccgcgtgtcgtcttccagttcttcatattcgtctatttcttcattctcttccttcaggtcggccgatatcggccgcgtcggagacacgatttcatagacgagatggggcttgtcatccccctgcatatagacggactgatgcaggacggtgaacaacagctctgcttctatatgcttgacaaagtgagccaatgcttcccgcttgtcagcaattgtcccgggccttacaagatcatcggccttcccatggtaagaaaaaccggttacttcccctgtcaaagagaggtcgacgtaaaacccggtcagcggaagcggcagaccgtcagccatctgaacataggaatatctcacatcgccatcatttgcggagccgattgtttccaattcaaactcagccaatgcccccggacgatgggtttctaaaaacgcccgcatccgtttttctatgtccgattccgatagaggcggcagatcagtccggaaagccggacgggataagtatttcagttttccgtcccggtctaattcgaccatgatgccggcttccggatcattcttatcttcccaccaaaacagaacctcatcttcctggtattcttccacattactctcatagcgggcaggtacgtttccgattcggagagccagctgtttcaactcttcttttttcatcataacacttccttttcttccaaaaagcttgatgattaccaagactcttttatacaaaactagtataattaacctgtccatcttcatgactatcgaattaatcattaacaacagggggtaaaccagatgtccatcaaaaaaatgagcgccgtgtttttcattctgcttctcacggcatttaccgccgcgtgcagcagcgaaacgagcggcggccaggaaagcagcacggcgaaagtgaaaataaaagagacagcatgggccgcttcagacgatactcaacatccggccgcgctgaaagtaacggtcaccgtcaaaaatacgggcaaagacccgcttaccgtcaaaagcagcgacttctcgctttatcaggatgacgcgaaaacagccaagaccgataaggaagacttgatgcagagcggcacgcttcatgctggtaagacagtgacgggcaatctgtacttcacggctgacgaaggcaaatcatatgaattggtatatcagccgcaggcaaaagacgcgaagcctttatcttataagctcaaagtcaaaggcacagcctcaaaagcagtacctgacccggcggacgcattatccgcctacattgatgtgatgctgtacggcaaacacaataaagatttcacccgcctgaccggggtaaatgaaaaaatgacggccgccgcatatcaggaatcggcgaaagccagctttatcacctctgcaggcatttcacaagaacaggcgggtccaaaagccatttccgctattattgacgccatgtcatcagcgctgcgggataacacagagctcaaggtgcataccaaatccatgtcaggcaaaaaagccgtccttgaagcaaaagtgacgccgcttgatatgtctccgcttgcgggccagctgcaagaccgcgtgcaagactatgccggaaagcaccccgatgctgatgaaaacgaaattgtcagccacctgctttctgtctatccggaagagtttatgcgcctgaaaccggcttcttcttccgttacaagagaaatcgagatgaagaaaaacgcccgcggccagtggtatctggatacagacgccgacctggaaggattgacagaagcgtttttgaaaacgtcctgacaacaagaaaggaaatagcgcaggctatttcctttttttattttcacttaaagatgtcactgatatattgaacctcatcctcggttaactgcacatgaagcgcgtccagattgtgtttcagctggtcagggcgtttggctccgggaatgatcgcatccaccgccggctgcgacagaagccatgcgagtgcgatatgcgctgtctgcgcccctttttcctccgcaacggcccgaagcttatccactcgctccagattttggcaaaaagcttctccctgaaacggcgccctgttctttcggctgtcctcaaagactgtgtcttttgtaaactttcccgtcagcaagccggaagcaagcggaaaataaggaataaaggaaatgccgttcttttcacaataaggcagcagatcatgctccgcctcacgctgaatcagtgaatattccgattgaaaaacctctaaatagccgtcggcgttaaactcctgcagttgccagaagctgagattggacgcgccgattgctctgattttcccttcgtccttcagttcttttagtgtgcccgccacttcggagagcggtgttttgccgtcagggaagtggacgtaatacaaatcaatcacgtctgttttcagccgcttcaagctgttttccgcctcactccggagaaattcacggctgttgtccagctcgatttgtccgttgacttctttatgcgcgccttttgacgcaatcacgaggctgtcccgcacgccgcgctctgcgacaacttcaccgattaactcttcggaacgccccaaaccgtatataaacgccgtatcaataaaattgacgccgccgtccaacgctgtgcggatgagttcttttcccgtttcatcattgagattgggaaacagattatgtcctccgaccgcattagcgccaaagccgatacgctttacccgtaaatccgtcctgcccagcgtacgtgtctcatccatagctcaggctcccttccttttatcgctctgtttagtattagatagacggtaagaattatcctgcctgaaagcctatctatagaaaaaaccttgaaaagcgtttgcccttcaaggtttttttgctgtgtattaagatgtcagagctgccgcgaagcgttcggcttcatccgtgagagcaccctcgatttccttatagcggctggaaatcgttgaggcgctgacgccgtacttcttcgccagcttcgcttgagaaacggacgcgccgttcagagaaatgctgttcacgtaatattcgaccgccgccgcgaaagcttcaggctttctgatcgtcggtgtttttttgacacagaacgttttccacagatcaattacggccggaaccagctcagccgggtattcatccccgctcaggcctttttcaatggcgtccgccgtttccttctccatgtcgttcgcccactctgtctgtttttcttcagcagcctgctcaggctcttccgccgatcctaaaagagcggccagcacagtgtcgaagtcctcctgcataaagcgctcaggcgattttccttccgcaagggccggggcagccgcctttttcactttgctgatcaaagcttcggtacgcttcacagggaagatcgtaaattgcatgaagaactccgctttttccgcttcgtggatcggatagccgagaatcaggcttcccgccggcggaagatcctgctggctgacgtccatttccactttgaattgttttttcgtcatcacatcttcaaagtgaatcattccttctttcacatcttcaagaaccataacggcaggtgtcatgcttttccatgattcaacgatttcccgtgttttcgggcggttgatgccgccggcttttttctgaagatattcttcaaaaatcgtcttgccgcctgccagcggacggaagaaaattccccagatgccgaggttgaagactccgatgtcttttgtctgtctgtccagctccgtaatgaacgcgtgctggttaataaatgatgatatgccgtctctatgtgctgtaaaggcgtactccattaggctttcctgaatctgtttcgcttcttttgccgcgatgtctgccggaatggcagcttctttgcttccgcagcattttttatatttcttcccgctgccgcatgggcaaggggcatttcttttcacttttcccacaataaaccctccgaattctgatataactttattattttaacaaaaataacttcagagggcttggtttacggcgaaaaaagaatatggaagaaaaaaaagcccccgggatattctcattctccggggctttgaaactgttaatttgtattttgtccgccgccgttcagaccttctttaatcagcccgtttacttggctgttcatcaaaagtccgatgtgtccgacaccgtgaatctgcacgttttttccgccgatcagtcgtgacagcgggttcaggacgattaagtccgctgagctgtaaatcgatgtatataaaatcttttggttcggatcagtccccggaagcgcccggttggtcacaaggccgttcgctccgccgagtgtgacgacgtttgcgattttgtctccgccgtcaagatttttaatgtaatagagcgtgttggctccgcccatgctgtgcgcgacgatatcgacttttttcgcacctgtttcgctgagcacttttttcacgtaattggacagtctcggcgcattgtgtctgttgtttccggttttgtctaagaaatcaatggcgtacatctcttttcttgaccagccttgggatgccaagtatgttttgattcccgcgaagttaaaggacgccccgccgattccgtggaccatgacaacagggttatgccctgaggaggctttcgatacggtcggctggaaggcaaatacggaaatgacggacagcatacaaactgtaaggacaactagaattttgttttttatttgtttcatgaactttcctcctgctatgtaatatttttgcagttttcattctattagaggagaaaaggaaaaaatagtgtattttttactgttttaaacaatttaaaaagagcggaaaaatgagaaagacgcccctttcccgaaagcacgctaatgctttaatacggcataccaaaaaaggagagaacacccggttctcttctcctagtactcattgaaataggtttgaatccgcttagggtcatgcgtttttgtcagcgcaagcatcagaagaatccgcgctttttgagggttgagagagttagaagctgtcaaatggtctttttcataatctcgattaggtgttaccgttccatttcccgtccttgtggagcggacgaccgccagcccgcttttgaccgactttacggcgcctttttgcgcctcatcagacattgagccgtttcccgagcctgcaaaaataatgccttgcgctcctgatttcacggcggattcaaagagatagcttccgtcattttgatagccgtatataatatcgacctgcggcagtttatcaagtttatctatctggaaatctgtatccttcgtatgctttcgggtgatgacgttattaaaatagacgtcatcagcaattgttccgatataacccatttcttccgatttgaaagtgtcggccgcggttgtattggtttttgtcacataacgcgccgaagcgattctgtcatttaatacgacaagcgtccccttgcctttcgcatcaggtgcagccgctgtttttaccgcgctatataagttggacggcccgtccgctccgatcgccgtggacggcctcattgacccggcgacaacaacgggcttgtcacttttgaccgtcagattgagaaagtaggcggtttcctcaagtgtgtctgttccatgtgtaatgacaatgccgtctgtatcatcagacttgagcagcttgtttacccgttttgcaagtttcagcagtgtctcgttattcatattctggctgccgatattcacaacctgttctccgctcacatgcgcgacctcttttatctccggaacggcctgaatcagggcatcaactccgattgcccccgccgtgtactccgtagctgacgtctttgaaggagcagcgcctgcaattgtgccgccggtggcaagaattttaatattcggaagtccgtcttttttcgctggggctgcggctgccatccggggcggtgtttctttcgcttgaggagattgggagcagccggccgcaatgaagagcagagccgtgataaatgtaatgaagagcatgaattgttttttcattcttttctctccttttctttatttatgaagattttcccctcaccggtcaacgcgcttgtcaggcaacctcccgaagaaaataaccgctaaaaaaccttgacaccgtcatgtgaaatcaagataatagaccagtcactatattttaaatttgtcaaaaatcagtaaggtgggaacattatgagctatggagattctcgtgaaaaaatcctcgccgcggcaaccaggctgtttcagcttcaggggtattacggcacggggctgaatcagattattaaagaaagcggtgcgccgaaaggttctctttactatcattttccggacggcaaagagcagctcgccattgaggctgtaaatgaaatgagccattatatccgtatgaaaataaaagaaagccttgatgcccatcctgatcctgcggaaagcattcaagcgtttttacaggacttatcaagccaattcacatgtccggagaactttgaagggtttcctgtcggtttactggctgccgagacggctttaaagagcgaaaagctccggcaggcctgtcaaagcgcttatcaggaatgggagaatctgttcgcgggcaaattgagatcagccggtttttctgatgagagagcggcggaaatcagcactgttttaaatgccatgatagaaggcggcatcattgtgtccttagccaaaaaagacaaaatgccgatcctccatatttctaaacaaatcccgaacctgctgaagacataaaatacgagagacattgtacgtatagaaagagaggagaatgattttggaaaacgctcagccttccaaacaatataaagtcatgccgatcatgatttctttactgacggcagggtttatcggcatgttcagtgaaacggcgctgaatatcgccctgactgacctgatgaaggagttacatatcactcctgcgaccgtccagtggctgacgacgggctatctgctcgttctcggtattcttgtcccggtatcaggtctgcttttgcaatggtttacgacaagacagctgtttatcgtttcacttgctttttccattatcggcacgctgattgcagcgcttgcgccgagctttccgtttcttttggcggcaagaatcgtgcaggctttaggaaccgggctgctgctgccgttgatgtttaatacaatcctcgtcatcttcccgccgcataagcgcggagcggcgatggggacgatcgggcttgtcatcatgttcgctcctgcgattggtccgacattttcagggcttgtgttagagcatttgaactggcattggattttctggatttccctgccgtttcttgtgttggctcttttgttcggtatcgcctacatgcagaacgtgtctgacattacaaaaccgaaaattgacgtgctttctattattctgtctacgatcgggttcggcggcatcgtattcggcttcagcaatgcgggcgaaggatcagacggctggtcaagcccgacggttatcggttcgcttactgtcggtgcgatcgcgctcatcttattttccatcaggcagctgacaatgaagcagccgatgatgaatctgcgcgctttccgctatccgatgtttgttctcggtgtcgtgattgtatttatctgtatgatggttatcttatcgacaatgcttctattacctatgtatttacaaagcggactgatgctgacggcgtttacgtccgggctcatcctgctgccgggcggtattttaaacggctttatgtctccggtgacggggcgcctgtttgataaatacgggccgaagtggcttgtcattcccgggtttgtcatcacggcaactgtgctttcgtttttctcaaacattaatggcgcttcaacggcgcttctgattgtcgcgcttcatacatgcctgatgatcggaatttccatgatcatgatgccggcgcaaacgaatggcttaaaccagctgccgccggaattttatccggacggaacggccattatgaatacgctccagcagatggccggcgcaatcggcactgcggtggcggtcagcatcatggctgccggccagaagaattatatgagcaccgcgaaaaacccgaatgatccttccgcatactctcacgcgctgattgcgggcgtccagcacgcctttatcttcgcgatgattgtcgctgttatcggcttgatcagcgccttctttataaaacgggtcaaagtgaatcactcataagaaaaacagcaggctccccgtgagtctgctgtttttcttatataccgcgcgcttcagccagttcatcaatcgcatagatcagatcatcggccgtgttatagaaatgaggcgccagccggatgatttgtccgctgggtgcgcatacgatgtttttccgcctcaacagcgcagccgtttccgccgctttttcatcccgtatggaaatcatgccgggtctgtcatcggcagacggcggccctgtgagatacagtcctttttcagaagcgtattcatacgcaaatgcgctgagtttttttacttccctgtgaatgcggtctgtgccggcatcgtttactagagataaagccgcctgtgccgcatatatgctgataaatgccggggttccggtctcaaagcgtttggctccgtccgcataagaaaaacgggttaaatccagcatcgacgtccgctgctgcccgaaccacccggtgactttcggcttcagccgttcggcaagttcctttctgacataaagaaacgccgttcccggtatgccgagcatatactttctcgcacccgcggccagcatatcaactccccattcttttacatcaatcgggatgtgccccgccgattgataagcatcgacaaaaagaagcgatcccttctttgcggatatctcggcaatgcgcttcatatcctggacaaaaccggacgtatatgacacatggggcacacaggtgaaaagcgtctgttccgatatgtacgtctcataccgctctaacgggatcattccattttcagacggcacgactgaaagctccatctcagtctgtgccttcaaaatgtgggcgatcgccggaaaatccaattccgtatacaccgcctgtttctttcggcaatccggtaaagcggaaacgacggcagagacagcagccgttactgaaggtaaaacggcaatttcttcaggatgggcgccgatcaatttcgcaaattcacaccttgcccgctccgttcgtccaatggcttcttcccagtttccgccatgctgaagcaggctttcctggtagtcattgatcgcttttgaaaccggcagggcaagagcgctttgagagcagctggcgagcatcgtatgtgtgcggagcgccggaaataaagatcggtattgcatcagaggcgaattcaagacatgtttcccccttcggcaggaatatatgtccattatagagtatggtaaaaagaaaaggagggttttatatggagaaaaaagtattgctgacaggctttgaccccttcggcggggaaacggtcaatccttcatgggaagcggtcaaacggctggacggtgccgctgagggccccgcctctatcgtatctgaacaagtgccgaccgttttttataagtcccttgccgtgctgcgcgaggcgatcaaaaagcatcagcctgacattatcatctgtgtcggacaggcaggcggcagaatgcagatcacgccggaacgggtcgcgatcaatctcaatgaggcgcgtataccggataacgaaggaaaccagcctgtcggggaaaacatttctcaaaacggtcccgcggcctattggaccggccttccgatcaaacggatcgttgaggaaatcaaaaaggaaggcattcccgcggctgtatcctacacggcggggacgtttgtatgcaatcacctcttttacggcctgatggatgaaatcgcctgccgccatccgcacatccgcggcgggtttatacacatcccgtacattccggagcaaaccttgcagaagtctgcgccgagcctcagcctggatctcgtgacaaaagcgctcaaaatcgccgcggtgaccgccgcggcgcatgaggacgatattgagaccggcggaggcgaacttcactaagctgcagacggcgcctcggcccatttcttccggtaaacgatgcgggacagcgtcacactgatttcatagaggacgagcagcggaatcatgacgagaaagtcagacataaaatccggaggcgtaatcagcaccgagacgacgatcagcacaaaatacgaaagcttccgcgcctttgccagccgggttggattcacgattccgagccgtgtcaaaaacatgacggccagaggcatttcaaacaaaaacccgaacggcaatgtaagattcagcataaaggtaaaatacttgtccgccgtaaataccatgtcaaaatggccggcggataattgtgttaaaaatccgagcacaatcggaaacagcacaaaatacccgaaggaaattccgataacaaacaaaaccgaaagccccggaatgtaaagcaaagcggcgcggcgttcaaacggggtcaaagccggcgccgtaaaacgccagagctgaaaagcggcaaccggaatcgctgccgtaagggcgcatattcccgcaatcatcatatacacccataaaatctcgctcggccctaaaacggccagcctgccatccaaatccttgatcagccagtcataaatatcctgcacaaaccagcaggcgccgataaaaaatagaagaaaggcgataacggttttaatgagacgctgccggacttcctctaaatgcccgatcaagtgggtttcttttttatccaatcgtacatcctccttatagagaaagaggcagaagcggattcgtctgcccccatgtcaggattcagcctgccgttttgtctttctcagccgtctgcttgtccggctcttcatttgagaccaatgtttttgcggcgcttttaaattcaagcagcgtgcggccggcggcacggccgatttccggaagctttgaaggtccgaaaatgatgagagcgatgacgaagatcaggatcaacccgggaatgccgatatttgaaaacatgagtgtgcctccttattgtgagattttggcccgtttctttctcatttgcttttcatgcgcattgttatgggcgaagaaacgatcctcttccacctcgtttgactgctttaaaccgcctgcaaccgcagcttgagagaccttccgaatccccgtctggtctttctgataaatgaatgaagcccgcgtggatacctcagcccccggctccgtcacgtacggcaccactctgtaatccgctctccattgggcaggggtcaccgtacagcggacatagccgcggtaatcgttgaaaaacttaatatgcgggttttgttttaagatctgatccgtatcggcccgtttatccgccccgtttcctccagatgtaatggaagtcccgacgaattcggctccgaaaatctttgaattcgtttgattaaaatcggtatgcaggtttgacgcccagcttgcgtgaacatcacccgtcagcacgatgacattgttcaggtttttgctttttataaaattgatgacccgctcccgctgagccgggtagccgtcccatgaatccatgctgtatatcggattggcggttgttccgaaattccattgcgcgaaaaagatttgctgcgccagcacattccacttcgcttttgaggcggctaaatttccgaacagccattgctcctgttctgtccccatcaatgtgcgcttcggatctctccactcgtcagaaggcggcttattcccgtcgccgttggcctgatcatctctgtactgtcttgtatcaagcacattgaacgatgccaaattgccataagaaaattgcctgtacagccgcatatcaggaccgttcggcaatgacatgcgcctgagcggcatgtgttcataataagcctggtaagctgcggccctcctgagcacaaacgcttcaacggattggcctttttcagggataatattggcataattgttttccacctcatgatcgtcccacgtcacgacccacggaaatgcggcgtgggcggctttcagattggcatcagagcggtattgggcatgacggttgcggtaatctgacagtgtatacacttcagcgctgctgtgcgtcctgacatttcccgtttttgacacatattcgttcggtccgtattcataaatgtaatctccgagatggaacacgagatcaagcttttccttcgccatatgtttatacgccgtataatagccgtgttcatactgctggcatgaggcaaatgcaaacgtcatggcggatacgtcagcgccgggagcgggcagcgttttcgtccggccgacgggactgagctcatgcccgcttttaaaccggtaatagtacactttattgggcttgagcccggccgcctcgacatggacggagtgtccgagattcggcttggccatttccgttccgcgtttgacgatgtgacggaaatgttcatcagcggcgatttcccattttaccggcacggcctgcttcggcatgccgcccccattcagcgggtcaggggcaagacgcgtccagagaatgacgctgtcagacagcgggtcgccggaggctacgccgagggtgaacggatagtttgaaaatttcggagcggcattcacttcaaacgcgccgatggattgcgcgatcgctaacccgagggaaagaccggcgattttcccggcgccctgtataaatgcgcggcggtcaaacgtattgttctgaaagcttttgttctccaattccttgatccattcatctaaacggccgtcatgtgtcatgtcagttcccctttcgtctcattgatcgcccttattataaaaaagaaatgttaaaccgctatgaagaagtgtgaagggtttgtaaggctgaaaaatggacggcgggagacatttttcacattgtttcgacaaaccttgccccgccaggagaaaaccccctctgtttctttttggcttgtcatccgtcaagcgcacttttttcctatttttcttcacaaaaaattaaaaaacaccgttcattctaagaacggtgcgcccgggattaaaatgtattgtacacgttttcgcacgtctcacctgtcggctgatagaagcagtgggatctgaatctggcgacaaacggctggccataccaagtcggcgggcagtttcccggcggcttaaaataccacaggctgaacttagccggccaaaaccgctctccgttaatcgtccggcgggcaagcctccgctctgattcgcgcggtctctggtaaaaatatccgtgagtcaccgcttcaaacgcgtgcggctgaaacaccatctgcctgatggtgcgcagacctttaaaatcagaacaattcgcccgcaccctattgattcccacattgccgaccaaaagcattccctgcttcccttcgccttccgcttccgccctgagcagccttgccattagatccaaatcggcgctcgatgcttttacgactgccatcatgacacctcccgtattttctcccttcatcatattcagcagcggcccagtgatgacagacaaaagccagaaaacaaatgttcacgaaaaaagggtttatatttcacgttatgaggaaacatactaacatgatttccataaggaggaattcgcatggaacacattaaagcgcttgccattaaaggcattatgaccatcattattctgtatctgatactcggcttaggttttcgctttacattcggcgacgtgctgctgatgaccattgtgctgggagccgtttcctactttacgggcgacatgtacgtgttgccgagatggaataatatcacggcggcgtccgctgatttcggaatcgcgtttcttgttgtctggctgatgggaatgccgctgtccatgggcatttccggaggaagactggcgtttgccgctcttatttccgccgtcatcatcgccgtcggagaatattttttccatatctatctgatgagaaaagacttgggcgggtcccgttttttagaaccccggtccgaataatttaaaaaaggccggataacggccttcagcttgtagaaaaaatgatgttttttctgcaagcttttttgttttgtgctgtttctttacatattcatttgatttcaggtgcagaaaaagcactcccacatgcctagccttgcttggctgggtatgtggcaaccttcttcatcattttgaataagatcagcggatcaagtgagcgctgcagtaaggtttggccttttcaacgatgaaagagaagtctatgtatttatcaatttttcgaagcaggtgatcttcttcgacgagttggtcaaacagaacgaattcggctgtgttttgagaaaaatttcttgtgcggaacatgagaaagacaccgtccttttctgactttcttttattttatgacaggggaatggatatattttaaggaaaaaataaaggctgtcgagattttctcgacagcctgagccccataaagggggctttttatttgtaaagtataaacgctttatacatcttgatataactgataaacccttttcagcctttcttcgagctgttcaaaatgaacaaagcgggcttctctcagaaactcagtcccatcaatgaacaaaagaagcacggggacagtgaagactgaaaatctgccggcaacctcttctacctcgtcagcgttggtatgccccaatttgatattcggaaactgatccaatacttttctgagctgcggcagaacagcgtgacatactgtacaggcgggtcttgaaatgtagataaaactgaattgatgctgcttaataaaattctcgatagaatctaatgaatgtaagtctgtcagctctttcatcaaaatcctccttcaaatcggctcgtctttcatgaccaagctcatcgtacattcactatacacatttatattgatcatatccgcttttttgctattcagagcaccttaacgttgtgcttgaaaaataaaagaacagttaccgcttttcagtaactgttcttagatacttatattaaaaatgcaaagcgtacgcccctgaaccgatgagtgcaactccgatggagactgcaatcagcaccaagttatattcaaaaccgccggcaccgttcgcaaaccctttcgctccatgaacttttacaatggcacctaacataatgatcgttataatagcagctccaagcgggaggaatacacctaaaataaataaaattccgcttgcgagttccccgagacctgataaagcggccgcggcattgcctggtttaactccaattgactcgaaccattgtccggttcctttaatcccgtatccgccaaaccagccgaataatttttgtgatccataaaacagaaacaccacaccaatcatgattcgaataagtaatagtcctgcatcttccatttttatctctccttatttttcatattatatgatgtgctgcaaggcagcttgtttaccaacagaggcttccagcaaacatctgttaaatgtatgccttattatttttcttcatgcttcacgttcatctatcaatcaatctaattctctcacttcaaacggcagcagcccttgttcaatatgagcccggtgcggttcatactgctcagggagcatcaattttccgcccattgtttcttgtgactcatcatgggcaaagcccggcggatcagttgcgatctcaaataagatttccccgtgttctctgaagtaaaccgcattaaaatagtttctatcctgaacaggagtcacaccatatccgttcgcagcaatgaatctttgccaatctaattgatcttcgtcatcctgagcccgccaagcgatgtgatggaccgtgccgacacccatttgtccgcggccgataggcgttaatttaagatcaatcacatttccgatatcaccggcagaacgataacgaacgaagtctccttctttgccgactcgctcaagccccatgaggttttccagcaattcacctgttttttcaggctgtgctgataacagggttgcaccgccaaagcctttaatggcaacatccggggttacatctccgaaagtccacgtattggcgtcccctgcttctctttccacaatttctaaatgcaggccatgcgggtcatcaaattctatatattgttctccaaaacgctcgatttttgtgtatggcacgttgaacttttcaagtctcttttcccaaaatgccatagcacctctcggcacgacgtaagatgtcacgccaacctgtccgtctccaatgatgccttgacgggcgtctgcccacggaaagaatgtgatgattgttcccggcttcccgccttcatccccaaaataaaggtgatacgtacccggatcatcaaaattgaccgtttgcttgaccaatcgcagccccagcactccagcgtagaaatcagcattctcttgagggtgaccgacaattgctgtaatatgatggattcccatcgtttttttagccatttttatccgctcctttacaaatatttaaatatactccacaaactcattcacaggctttcggtagccgcgcggccttctgctttctattttttctttcccgattgtaatcatcatgacaacctcaaattgatcatctatcttcaaaatctgtttcacggcttcagtatcaaaccctatcatcggacaggtgtcccagcctttttccttagcactcagcataaacatcatcgcagaaagtgaagcatttcttatcgcctcatctctcttaaatggttctcccttgttttcataaaacgaaacggtgtcttgaaccatgtgatcatactcttgtttatttaataccccaagcagcttcaatccttcatagatgtcagccgcttgctgatatgcctgcttatcccctaaaaccaaaagaaccgctgatgagctaaacactttatattgtccgtttgcggcctgcttcagcttttcttttacatccgggtcaagaaccgtcacatattttgtatgctgcaaattaaaagctgatggagccaacgcaaccaattcaaacatttcgttgagctcatctcttgtgattggatgttctggaagaaagttgcttgcagatcttctttcattcaccagctgtacaaattcagccatttctctcgcaccccttttatctcgaattcgagatattatagtataaaaaatcaaataacgtatgattaaaaaacgaaacgttctcttcactgatcttttcgtgaatcaaacgatcggcaggttcttatcctgcactctaattaaattatcttgaattaaaaaatcttgaattcgagataataataaaagataaatactcaaatgtcaacagttcatttataaattcagcgccattttgtctgtgtactgtttagccctgctccaactttttttctgccaccttatttattagtaagcaggaaacaaccttgctatagacccactcgaaactgaattggtacgataagcaaagtgattacacaagaaaggatacggagagcgaatcaaaagcgcccctatttttttgtgcagttttataggaggaaaaaatgacaagtgaaagagaacaaataagcaaaaaagttgctttgattgcattgatagccaatctgatcttaatggcaggaaagatcttttttggactgataggcgatagtgaagcagtttttgccgacggtatacattctgcagcggatgtcgtggcttcaattgctgtcctggccgtcatcggcatttctaataagccgcccgatcaagaccatcctttcgggcatggcaaagctgaggtcatcagcgaagcgattgtaggaataatattagtgctcgtttccgtgtatattctaatagaagcgatttcggcctttgttgagggcccaagcatcccgcaatacagcgcattgtttgcggctctgatatcctacgcggctaagcagatcttatatcgttattcgatcaaacaaggggaaaaatggaacagtaaagcgattatagcgattgcatacgatcataaaggcgatatcgttgcctctcttgccgcttttatcggcgtcctattggcgattatcgggaacacatacggatggtcctatctgttgtacgccgatgcaattgccagtgtcatcgtggcgtacctcatttttaagatttcaatggaattaatcaggccgtctgttgacgttctcatggaaaaaagtgttgatcccgaactgatagaggaatataaagcgattattttgcattgccctcaagtcaaacggctcgataaaatccgagcaagagaacacggccactataaattgcttgatgtccggttatctttggatcatgatttgacgattaagcagggacacgatattgcccgcgaaatcagaaatgaaatcaaaagacacttctcagatgttgaagaagtgctcatccatgtgaatccttattttgaagaatgaaaaagcagcttgtagagaaaatgatgttttttctgcaagcttttttgttttgtgctgtttctttacatattcatttgatttcaggtgcagaaaaagcactcccacatgcctagccttgcttggctgggtatgtggcaatccttcaacatcattttgaataagatcagcggatcaagtgagcgctgcagtaaggtttgaccttttcaacgatgaaagagaagtctatgtatttatcaatttttcgaagaaggtgatcctcttcgacgagttggtcaaacagaacgaattcgggctgtgttttgagaaaaatttcttgtgtggaacatgagaaagccattttttctgtctttcttttattttatgacaggggaatggatattttaagggaaaaataaaggctgtcgagattttctcgacagcctgaaggccggataacggcctttttcgtttgatttcactgatcaatatgctttctgataaaatgcagcagcgtgtttccttgagcggtcaatatgacgcccttcgcgccgcacttcggacagggcgtcccttctttctcctggccggttccttcacaatgcggacacgtgagctcaaggtcgtcggttgcgatcaccatgaatatccctccttttttgattgtctgtccgtctccagtcactttccatggccatcacctccttaacaacacaaaaaaaccccgtccatcaaaggacgaggttttcgcggtgccacctttattaacggctgaagagccattctctcaaaaagtacagaaacacacggtttcaatactcctttcttgataacggggaaagaatcccggcaccgcctactgtcatttcagcacagcaattcagaagcccattcggcaccggacggggatcggttcacagcggccaccgactctctgaaccccgcgcgctgatgcgtacttactcttcctcagcattgttcatccgttcttttattttaaaatgtatcatacgctgtcatccggcggaagtcaataacctttcggatcggacaggccgagcatgtcccgcgccatttccatatgctcctcttgccccgtctgaagcgcgaaattcgccgtttccacagggtaagcagcctgccattctgtcacatgctgattttcgtttacaaaaatatgcggagggtgcaagccatggatcagcgcggaaaaatcaggccagtacgaactgtcatttatccacgtttgccatcttttccaaagccagctcaccggctgcctccgctgacaaattttgatccttcgcgtaaatctttcgcctctaaaaagaagacgtgaatgaattttttcatattcactttaaccggagaaagcggcacggtttccttagcctgcatttctttcattctcttgctgacagcggggaaatcaaagaatttcgaggcgtaatattcaaatttggggtttgaaaaatccgttgtgcccaatgaagcaaaatggtttaacgaatgaatgacggcccttctgatccgctgttccgaggctttgatttccctgttaacctcggcttgtgccgccgcaggccccagcttccggatggcgacgtttgtaaacatctgctttaaagacgggatgtttctttccgcctgttcatcctcaaataaatagtgaaggacggccatgaggtcatgcgccccgctttctcccacgatgcctaattccgataaaagaaattttcctgtttctttgattgatttctcgtgcatccccccaggcccgctttttttcggctcattccgctgaataaggcggcttaacgagtgttggatgtcgccgatcgaggtttccagttcaatccgctcttttacttttcgcaaaacggtgacgatctcgattttgttgatcggtttgtggataaagtattcgatgccgagagaataagcttctcccaccatttcctttgcctccacctgcgatatcatcaccgcttttccgttgtacgagccctgaagatgccggatcgtctcaatcccgtcccgccccggcatcagcagatcaattaataaaatatcgacttgcttaaaatggagataatgcccttcaatctggcttccgtcctctgcctcaccgacgacttcgcctaagtcctcgtcctcgatcatctgttttaaaatggaacggatcgcccggtcatcatcagctataaaaaaacgcatattatgagttcatcctttctgcaatcaaatgcttcaccggcagtttaatcgtaaatatgacgccttttggcttgttgtgaaaggaaatgtctccgtcaagttcagttacgatttccttcacgtaagtaagcccgatgcccgttgaaggtgtgccgaattcatcgtatttggatgtaaacccgggatcataaacgacctctccgattttttccggaatgccgggaccgtcatcttccgcctgaaattcggccatctccccctcagccctgcgcagtgcgaggcggatctcacccctgtctcccatggcttcgacggcattggcggtcagattatttaagatcgacaggacggtaaagacgtgataatcgggatgttctccttcaatcacgctccggaattgaatgtccttgcctaaagattcggcgtatttttcattgattcggatgacgatgccgaccagagcggcggcattcatgtaatcccggaatctctcattggaaatcagcttcgacaggccggcgaatattcgctgattgtcttttttcacttcatgaatttctcccgcaagtcgcagcattcggctcccgagctcccggtcgttcccgctcatttcccgatacagctgataggattctttcgtcacatgctccgtcgttttcagcgtttttttcaaatgaatcgtttcttcatataagttagacacaatcatcagcatgtgctcatgctgctttctcgtttgtttttccctgacctgagattcgtgcagcttcatcacgttgaaaaaactcagcacaataaatgtgtgagaaacagcgataaccgcaatatccgccagcttgtccggcatcataatctgccggccgccggaaaactgaaccgtcatttcaacggcatcggacgcaatttcaatgagaaaaccgagaaacccgatcatcagcggccgatcccaaaaaagcctgaccttcagcacataaaacaagcaggcatatgtaaagtaaaaaaagaaactgggatattggctgaaaaaagcctccgtaaagccggcatgctctcctccccagcacgccaggccgatccggaatgccacaacggctgcacctgtcaacagccctgacaatactgccggcacatgccgaagcagcagcagaaaaaagaaaaaagccggggcgccgaagctgatccgatatacctcattcagggggtaaaatttcagttcccccgccagcggcacggtgatcagcataagggcgaaaagatagccgtcttttttcagtaaatagtcgagcctgatcataatcacttccttcttctgtctattttgaacaagaccgatacagtccgcaaatttctttagacccgaatggcgggacactccggctgatttataaatctatcggcttattttaagaatgattttgtcgtattttgtatgattctgtagatgtcattatacattaacatggaacacgctatttttgaaaacgttttccaagaccgggttccgcttcggacaggcttgcaatagaggaggaatgttatgaaagatatggtcagagagcgccttgaaaaagaggaactggcttcacttttacaagattgggtggagcattaccgaccgttttcagtcaatggaaaaagcgcaaattatatacccgccctcggagaaatcaacgactctcagctgggcatttgcatattagagccggatggctcaatgattcatgccggtgaatggaatgtcccgttcacattgcagagcatctcaaaagtcatcagctttattgccgcctgcatgaacagaggcatttcttacgtgctggatcgtgtggatgtggagccgacgggtgatgcgtttaattctatcatccggcttgaaatccataaacccgggaagcccttcaacccgatgatcaatgccggcgccattaccgtcgcctcgctgcttccgggtgaaacggcgcatgataaattagaatatctcttttccgtttttgaaaaattaataggaaaacgccctcacattcacgaggaggtcttccgttctgaatggcagaccgcgcatcggaacagagcgctcgcctactatttaaaagaaacgaactttctcgaggcggatgtggaagaaacgcttgaagtgtatttaaagcagtgcgccatggagggtacaaccgaggacatcgctttaatcggattgatacttgcgcatgacggctaccatccgatccgacgggaacaggtcattccgaaagatgtcgcgaaactcgccaaagccctgatgctgacgtgcgggatgtacaatgcgtcaggcaaatatgcggctttcgtcggcgtcccggccaaaagcggggtatccggcggcattatggcattggttcccccaagcgccagaagagaacagccttttcataacggctgcggcatcggcatttacggtccggccattgatgaatacggcaacagcctgaccggcggcatgctgctgaaacatatcgcacaggagtgggagctcagtattttttaatcaaacgaaccaagaggtgattggatgcaggaattccttgaaaatgtaatcggctcggcaaatgattttttatggtcaaaactgttaatcgtactgcttctttctctgggactattttttacgttcagatcaaagggtctgcaagtccgcatgctgaaggaaatgatccgggttttgaaggaaggcgcggccgcccggacaaaaaacagcatttccccgtttcaggcattttgcatcagtatggcggcgcgtgtcggaaccgggaatattaccggaatcgccattgcgatctcactcggcggtccgggcgctattttctggatgtggattatcgcagtcatcggttcggcttcaagctttgttgaaagcacgctggcccaaatttataaagtaaaagatcaaaacggattccgcgggggcccggcctattacatggaaaagggcctgaagaaacgctggatgggcgcgctgttcgccgtattaatcacactgtcattcggggttgtttttaattccgttcaatccaatacgatcagcgtcgcctttcaaaacgcattcggcaccagccggcttacattgggcattattttaatcttggttttcggcggcgtaatcttcggcggcgtcaaacgaattgcgaaaatggcggaatacatcgtagtcgttttggccgttttatatatcggtgtcgctttctttgtcattctgacgaacatcacccaattgcccggcgttctgtcgctaatcgtaaaaaatgcgttcggcattgatcaggcagcgggcggcgctttaggtgcggccttgatgcaaggtgtaagacgcgggattttctcaaatgaagcgggtatgggaagcgctccgaacgcggcggcgacagctacgacgagccacccggtgaaacaggggctcattcaggcattcggcgtcctgacggatacgctcgtcatttgcacaagcacggcgcttatcattttattttcagacgcgtatcaccagccgggactgagcggcatcgcgctttctcaggccgccttgagcgatcatgtcggcgcgtgggcgtccggtttccttgccgtcttaatgcttttgttcggcttcagcgctctgatgggcaactattattacggagaaaccaatatcggatttttaagccagaacaaaaaatggctgttcatttaccgtatctgtgtgctcggaatggtactgttcggctgtatttccaaagtccagcttgtgtgggatatggctgacttgttcatgggcttaatggtggtcgtgaacttaattgcgattttccttctgtcgaaaaaagcgtttgccgctttgagcgattatgtccggcaaaagaaagccggaaaggaccccgtcttttacagagatgtgctccctgatgatgacgggatcgactgctgggagtattcagacatcgcgaaaagtgcgaaaggcaaacacatttcctaaacaaaaggtgttcgggcagcgtcctgaacaccttttttctgccggttcattgacaaagagaatagcgtccattaccctttttatatattttcagtaaagtcagaaaggaaggcctatgaatcccattacacaaatattaaatgaatacccggtgatgatcatagacggcgcgatggcaaccgagcttgagcggatgggctgtgatttacatgacgatctgtggtcggccaaaattcttttggagaggccggaactgatcaaacaggtgcatgcagaatattttgccgccggcgctgattgcgcgatcaccgccagttatcaatcgacaatcgaaggatttgcagcgcgcggcatcccggaaaccgatgcgatacgtctcattcagacatctgttgaacttgccgcgcaagcacgcgatgaattttgggcgcatgaagaaaaccgtttacaccggcccaaacctttggtcgccgcttctatcggaccttacggcgcgagcctcgctgacggctcagaatatcgcgggcattacggactgacggaggatgagctgatcagctttcaccgcccccggatgaaagccctcatagaatccggcgccgatcttttggcctgtgagaccattccgtgcctgtcagaagcaaaagcgatcacaaggctgctggaggaattccccggcacttatgcatggatcagcttcagcgccaaagacggacggcatatcagcgaaggcacgcctatttccgaatgcgcggccctgctcggctcctgcagccaaatcgcagcgatcggcatcaactgcacaccgatcgaacatattccgcagctggtacaagaaatcaaacgggcaacgtccaaaccgattatcgcctatccgaactctggcgaacaatatgacccagtgacaaaaacctggaaaggcgcagcgtgcgaaaaccatttcggaaaaagcgcgcaaagctggtacgaaaacggcgtgagcctgatcggaggctgctgccggacgaaacctgcggacattcaggccattgccgattgggccaagaccttaaaaacaacttgactaatcggaatagtttgtatattctattcaaaaagccggttcgccggaatctcgtgccgttcgccggcatgagattttttattaggacggccctcgcagaaagttggaaaacaatgaacaacaagaacgagacgaattttcagagaagtatgaaaagcagacacctctttatgctatcactcggaggtgtgatcggaacggggttgtttttaagctctgggtataccattcatcaggcgggtccggcgggcaccattttcgcttaccttttgggcgcgggcatcgtctatcttgtcatgctttgcctcggcgaactgtcagtggccatgccggtgacgggcgcattccacacctatgcgaagacctatatcgggcccgcgacgggctttacggtcgcatggctgtactggctgacgtgggcggtggcgctgggctctgaattcacggcggccgggcttttcatgcagcgttggttcccgcatacttcagtttggatgtggagtgcggtattcgctcttttcatctttttattaaacgccttctccgtgaaattttttgctgaatcggagttttggttctcaagtattaaagtcttagccatcttactgtttattttattgggcggagcggcgatgttcggcatcgtcccgatgaaaagcggtgaggccgcacctatgctgtcgaactttacggatggcggcagcctttttccaaatggctttttcccgatactgatgacgatgctttcagtaaactttgctttttcagggacggaattgatcggaatcgccgcaggagaaagcgccgatccggagaaaaccgtccctcgcgccattaagaccacagtctggcggctggcgcttttctttatcggaacgatttttgtgctgtcagggatgatctccatcaaggaagccggtgtgattgaaagcccgtttgtcacggtatttgacagagtcggcgtgccttatgcggccgatctgatgaatttcgtcattttaacggcgcttctgtctgcggccaattcagggttgtacgcgtcatcacgtatgctgtggtccctgtctaaagaaggggagcttcatcccgcctttgccaggctgacctctaaaggcattccttttaacgctctgatcttcagtatgatcggcggcattctgtcgttgttgtcaagcgtatttgcagcggatacagtctatcttgttctcgtctccgtctcaggatttgcggtagtggctgtgtggatgagcatcgccgcatcgcaatttttgttccgaagacggtttcttacagaagggcaccagctttcagacttgaaatacaggacaccgggatatccggccgtaccgatagcggcctttctcctatgcctcgcctcctgtatcggcatcgcttttgatccgaaccaggccatcgccctttattgcggaattgcatttatggccgtttgctacaccgcttattacttgaaaaaccggaaaagcagagcctgcgtgcaagccgtaaaatcccaataaccgaaaaaagaaccctgcagcgcaagggttcttttttcatttatacttcaaccacccatctgaatgaatcccgcaccttcccgacttggatgccggcaatcgtttcatagagcctttctgacacttcaccgatcaaaccgttattcagttcaattgtttctccgtgaatgtgcagcgcgccgaccggcgagatgacggccgcggttcccgtaccgaatacctctgacacctcgcctctcatcgcagcctcatagatgtcatcaatcgcgacctgttcttccctgacgcggatgccccagctttttaacagctctatcacagatgcgcgtgtgatgcccccgagaatgcttccgtttaatgccggcgttacggcctctccgtttatgatgaaaaagatattcatactccctacctcttcggcgtatttcttttccaccccgtcgagccaaagcacctgatcataccccagttcttcggctttccgctgagcctgtaagctggccgcataatttccggacgttttgacgtcgcccactccgccggtgacggcacgcacatactcatcctccacataaatacggatcggtttcagctgatcgccgtagtacgaaccgacaggcgtcagaacaaccatgaacttgtaacgctttgaaggccggacgcctaaagaaggctcagtcgcaattacaaacggacgaatatataaagaggttcctttttctatcggtatccattcctgctccagctccaccaattgtatcaatgcttccagcgccagcttctcgtcaagaggcggcatgctcatccgccgtaacgatttattcagccgttttatattttggtcaggacggaacatcaacacccggccgtcttctgacctataagccttcagcccttcaaatacggcctgcccgtaatggaaaacggatgcggacggatcaagatggaccggttcataaggggtgattctcggatcatgccaccctctctcctcttcgtaatccataacaaacatgtaatctgtgaagtacttgccaaatcccaatgaagcggaatccggtttttcttttcttgctgtgaccttacgtctttcaatcagttgattcaacaaaagcacacctttcttgtaattttttaaattttcagtcttttataagctgcctgttttctctgcctgaatcgtgtatgcacagatatatgagaatgcagttgaccgtagcatatcaaatataccacttataagaggataattatcaaaatttttaatattttcatcagaaatctttctttattcttatgctccttcatttttttcaatgaggactttctgtcatattaaatgattgcgcttacataatgtaaaacaatcctttctatcgtacagtcaataatgtgacaaatttatggcggataggaaggtggttgccgcctgcttcacgaattacgtatgaaatgcgcaagtaaaagggggattcgcttgaaaaaatttatcgcattccagattttgatcgctttagccatcggagcattgatcggccatttcttcccggatttcgggatggcgctgcggcccgtcggagacggatttatccgcctgattaaaatgattgtcgtgccgatcgtgttttcaaccattgtcatcggagccgccggcagcggcagtatgaaaaaaatgggcagtctcggcatcaaaacgattatttggttcgaagtgattacgacgcttgttctggcgctcggtctgtttttggcgaacgtgctgaagccgggagtcggacttaacctttctcaccttgctaaaaaagacattcacgagctttccggctatacggaaaaagtagtcgacctgaaacaaatgcttcttgatattatccccgttaatatcattgacgttatggcgaaaaacgatcttctcgccgtcatttttttcgcgattttattcggtgttgccgcagccggcatcggcaaagcctccgcgcctgtcatgagtttcttcgaatccacggcaaatattatgttcaagctgacgcagatggtgatggtcaccgctccgatcggcgttctcgcccttatggccgcctccgtcgggcaattcggaatcgcgcttttgcttccgatgctgaagctgatcggcactgtgttcctcgggctgttcctgatactcttcgttctgtttccgatcgtggggctcatctttaaaatcaaatactttgaagtgctgaaaatgatttgggatctgtttttgatcgctttctccacgacaagcacagaaaccattctgcctcagctgatggatcggatggagaaatacggctgtccgaagcgggtcgtctcctttgtggttccgtcaggtttatcgctgaactgtgacggctcaagcctctatttatcggtgtcctgtatttttctggcgcaggcgtttcatgtggagatgccgctttctcagcagcttctgatgatgcttgtgctcgtcatgacaagcaaaggcattgccgccgtcccgtcaggctcactcgtcgtgcttctggcgacagcgaatgccgtcggtctccccgcggaaggcgtcgccatcattgccggtgtcgaccgcgtcatggacatggcgagaaccggcgtcaacgtgcccggccatgcggtcgcctgcatcgtcgtgtccaagtgggaaaaagcattcaaatataaaggacccgtcacggcagaccagaccgcccggacagaaagtatgtaaacacaaaaaagaccacctcattggtggtcttttctattaatcaatcgccgcatgatcctctttttcaatcaaagcaaggcgttcattgatttcttcctgagtcatctcgtgctctttcacatacatgttgcgttcgttcgtacggcattcgtgactgcagctgcgcatgtatttgtattcattctcaggtgtgcagatcatttttttattacatgccggatttgcgcagttcacataacgctcgcacggctcgcccgtgaaataatcttttccgatgataacgtgctctacgcggttgaccggtacgctgattctttcgtcaaacacgtagcactgtccgtcccacagctgccctttcacttcaggatctttaccgtaagtgacgataccgccgtcaagctgggacacgtcttcaaagcccttcttcagcagccagccggaaaatttttcacagcgtacgccgcctgtgcaatacgtgaggatttttttgccttcaagcatgtctttgtgctcttcaatccagtccggcagctcacggaacgcctcaatatcaggtctgaccgctccgcggaaatgaccgaggtcatactcatagtcgtttctggcgtcgatcacgatcgtgtcaggatcctgcatttgctcataaaaatctttcggtttcaaatgcttgcccgtcgtgacattcggatcaacatcatcttcgagacgaagcgtcaccaattcttttttatgacgcacaaacattttgcggaatgcatgtccgtcagcctcgtcaattttgatcggcatgtcggcaaagcgcggatcagctttcagcgcattcatgtattgttccgtctgttcaactgttccggacaccgtaccgttaatgccttcctcagaaatcaaaatacggcctaacagaccgagctccttacaaaacttcaaatgctgagcagtgaactcttcaggctcatcaatctttacatatttataataaagtaaaactctatattgtttttccatgatttatacaccctgttcaattaaattaatgatcgcacactctactatatcatacaggaaaacgggcgaaagatgaacatttccgtccgtactctttcttccagtcacgcttcgccttttaaaacctgctgaaaataaaaccgatacgtgttgcgcaaaaaggtctcaagcgaaaggccggccgcggtctgatacttgccgataataaacggaaaacggtcacggccttttgcccgcagaagatcggcactgtcttcagccagttctgagatgagctcctcaacgacaggccggcatgcgtcccgcacggcttcaagaatttgctgatcccctgtatgctggtactgctctatcagctttgccaaatccttttctttcataatgttcacttccttacaccatataaaaaagaggagcagcttttataaagcggacgcctcctcctgtgactccgcataaccgatgatctgaccgacctgtaattcacggccttcagtcaggttatccgaaggggtaaacatatctttctcgaatactaaaataacggtcgatccaaatgaaaaatagcccagctcttcccccgtctcaagcctgtttccggtgtttgtctgaacgatcgagttaatattcatcgcacctaccggaatcatgagcatctgctggtcagcacgggtcagctcgtacacataacggtaattttttgagagcacatctttcccgtacttcaatcccatcgtattaacgggataggagcgtttccccaactcggccagcttctgatacgtgcagctgacgggtgaatggaagcggtgatagtgtctcgggctcagataaagcacggcaaaacacccgccgttatacttgtgatcggcgcttttaaaacccgtcagttcggcgaacgaataatccttcccttttaccatgaaagtttgattgggtttaatcatgccaaccgtctgaacgacgccgtccaccgggctgacgatggcgttcttctcttttgccacggggcggaggtttaaattaatatcacgaatgaaaaatgacgccagtgaatcaaagtcagaagccgtacgttccgtttcattccagttgatgcgatagtgtttggaaaacagcggaatcatcggcttgctcagtttcgattcacagaagtttttaatgagataagacgtcaatcgattattagtcagttcaatcaatgaacggtaaagaactttagcggcagtattaaacattgattactcctatgaattttcctatagtaataaaaataaaacaccataaaaacgctccgatggcggcgaagcataagtaggttttgaattccattctgccgattccggaaaagtagcaggtcacgtgtctgatgccggggatgaaataacctaaaataatggtgtacggcccgtacttcttcatccacctgtctactttctccatcctcttttccttcaggccgacccattttccgaacttattaataaacggccggccggcttttctgccgatgaagtagctgataatcatcccaaggagcgctccgataaagctgatcagaatggagagcccgtaattcagcacgtttaaatgagcgaagtagcccacaagcgtcatcatgacttcatccggaataggcaatccgataataccgagtgtcagcataagaaaaatcgcgatatatccgtaatcggatattaattgctgaactaattccatcttctgctctccaggttttcaggcgcctgttttttaaagtgcggaaatttaatgttgctgaccattaaataaccgagcgcgatcgttcccgcccccagaagaaaagcgttattgataaagctcaaaatgacaagacacatacccgcaaacggaatcggcatcccgataaacgtcggcagcttgctttgttcaatattaaatctggaaagacggatcatcccgcagatactgtaggaaagcgcgattaaaattccgatgaacggaatcgtatatagtgaaacactgtaagcgagcatggacggcgctacgccgaacgtcacgagatcagcaaaagagtcaagctcccttcccatctccgataccgcgttcagcttacgggcggccaaaccgtcaaagaaatcaagaaacatcccggtgaaaataaagatcaccgcagagtgtatattatgatacaaaagggaatgaatcgataagagcccgcaaatgaaatttccaattgtaatcatactaggtatataattcacagtttacacaaacctccaattaaaaccatatcaaatcggactgcgtatgcataaagactccattttacggaaacataaaatggaattctttcaatgctatcattcaaattcttttattatacagcatttggtgttatttgaacaatctaatctggtgatttttgttttttcgccgttcatattaaggtaagcaatcatggtttcctctattccggattaccctgcttaaatattccatgctgcgatccggattgtccgttcttgatgaatgaaaagccgtatgatgtattgttatttccttctccgtgaaatgagaacattacatataacgattgcggacataaaaagtttcaagaattaaaaagccggcacaaaacggcctcatacattatctcacaaccccgttttccagtatatagtctgtccaaacaaaaaaggcgccttaccattacggtaaaaacgccttttaagatcattttatgtaattgataaatgactgagtgcttcggccgctctttctctggcctcttcaacggtctcagctgcagaaagcgcaaccgccatacggcgtcctactttcgtgacgggtttaccgaatacgcggacctgagtgctttttaccgccaaagctttctccaaaccttcaaccgcataatcagcaagctcttttggcgccttcagcggacggcttgcccccggcgacagctgagtgatttccggaatcgggaatcccaataccgcgcggacatgcagcgcaaactctgacaaattttgcgtcacaagcgtaacgagccctgtatcatgcggacggggagacacctcgctgaaatatactttatcttcagtaaggaaaagctccaccccgaacaaaccgtatccgccgagctcgtccgttatgcttttcgcaatgtgtttcgcctctttgatctgctgttccgtcatatgatgaggctgccatgattcaatatagtcaccgtctttttgttcatgtccgatcggcgcgcaaaaggacgtaccgttcgccgcgcgcactgtcagaagcgtgatttctgattcaaacggaatgaattcctcaacgatgacccggccgtttttcactcggccgccttccatcgccatgtcccagcagcttttcagcccggaagccgagcggcacacgctttgcccttttccggaagagctcatcagcggttttaccacgcacggaaagccgattgtttccgccgcttctttaaattcttcatatgtattcgcgaattcatagccggcagtcggaagatgaagcgtctctgccgcaagccgtctgatgccttcacggtccatcgtcagctttgccgcacgcgcattcggaatgacatgaaaaccttcttcctcaagcttcagcagctcatccgtcgcaatggcttccacttccggcacgatcaagtccggtttttctttctcaatgacttctctgacctgcgctttatcaagcatatcaatcatatagcttttgtgcgcggcctgcatggcgggagcatgctcatagctgtcaacggctacagtgacaaccccgagccgctgcgcttcaatgacgacttctttccccagctcgcctgctcctaataacaacatcttcttcgcctgatacatgtcctttggcccctccctttctataccccactcattataacggaaatattcaaaaaataaagacaagatagatgacagctctatcctgtcttttgcgctgattcgagcgattcaatcgcagctgacacgtccttctcgcgatattgccccattaagcataacgattcttccgcccggcaggcgtgagaagcaatacagcgcttggcttcctcatgattgtcaaggatgccgagatcacagaggctgacagggaaaccgagccggcggtaaaacggaagcagctcttcaatctcaggtctccgattctcgagcgcgagctgcaccaatatgccgtaagcaaccttctggccatgcagcacctgatgtgtctcctggagaaaactgagtccgttgtggaccgcatgcgcccctgccatcctgcacaaacggccgccatacccgccgaccgttcccgcaagcataatgatcgtttccgccgtatggataaacggcacggacagctcgcctttctccatgcttccgacggccgcttcactgtaacgcaataacagattacggatatattccgcctgtctcagccccgcctgcgccatcagcggcgccgcctcctccgtatttctgatgaccgcctcagcctcataccatttcgccagcgtatcaccgatcccgcttttcatatattcaatgggagaggaaagcaaaaacagcggatcaacaagcgccaaatagcttgaacgcttatgataatcaactctgataaaattgccgctctcatcatatatgacactcaacggcgtacttgccgcacacgtccctgcaatggaaggaaccatcacagcctctatatcaagccggtctgccgccgcttttgccaaatccaaaatcgtgccgcctccgataccgatgatcacatccgcgtcttccgcctgctcacagaccttacgcaccgcctcaggtgaacagtatcctttatgctgaatcacatcccaggaagaaacgccgctgtaatcggagaacgcctgataggatttgattccggtcacaataacgggttttctgaatgtctctagcagtcctggaagttcttttgcgattccttccttgcatatgtactgattcgggccgcttcggacgatatcttcaggcttcattcgaatctctcctttggctggaatttatatatattttcccacttgtcagaaaatacatcaaccggaggtgcgtcagcgcttcgcttcttccgcctccaagaacagctcatcaagccgctccaaagcctctgccttttcaaaactgctgaaccacagatcatcataggaatcaaggatgcggtaatggtgggaaatcaaatgctgctgcaagcggaactcgccttttttctcgatggttttccaccacaccttgccgcccatcgtcttccccttcggcctgtcaattgtgcgatgggcaaccgcttcaatgacctccagcggatcatctcctaatacggattgcagtgtttcacttgatctgaaaagcgcgcaaaccgccacaacatgcggccattccgcaagcgcccgccctttctcaatctgcaccagcgactttttagaaaggccgatcacatccgccattttctcctgtgtgtagcctctctccgaccggattttcttcagctggactgagacaagctcagtcatataatcttgatccatctcaacctccatatttatcaatatagccattttacaccggggcacgccttttttatatcagaacattttcaaacgaatcaaaagaatcggtaaaaaagaacccgggattggcttatcattgaagcgatgtacctttccgcataatccagaatgatgcgttgaatacaaacgtacgcccgaagagacaggggcgggctccctggcgattgagctccggagaaaataaaaagctgccgcagcagcagcagctaaaactttatagaccggaaaatcggcattatgaagcgaatacaatccatcttgcactataattgacacgttttttcgaaccctgattgaccaatttaaatctgtatgaatctccttttttcaacgaaggtgtttcaaaataagtcgttccatttttctttgcattggcggttttgattgttttccaggcacctttgccgttgacttgcttttggacgtatattttatacgtgcccttccctttactgttggatttaaaagtcacggctctcaagctgtacttttttgtcgttttagtgaatttaggatgatatgtattgatcacatagttagtgaaatacccgcttttataagtatgaagccagtctttagcctctgctttttgcggagaagaaaaacccataaaaccaattccgctgattaaaagagtaaaaataatgatgagcgacttaaaaatctttttgcttttcatccagaaaacccttccttcctgtaactatttaccctatttatgttaatgacaatatagccaatcataaatccgtccaactaaccattttgaccgcagaaagagatgtgaacagtccttaaaatgactatatgactactacttatgattcttgttatttttgattaagtgataaagttactttaaaccgctatccattttgttgtttttgtatcaattgtcatagcgaggtcttttcctatcaatgcctctctttcggcgtttgttctgcggctgtatgatggggctctccttgataaacttctgcacccatgacaaactgtcatacgtttgccacctatgaatgaacgcacactacacctaatggagggattgcaatggacgaaatggtcctggaaacacaacaatggctgaatgaaacgtacaaaggcagacacgggtacaacaaagtgccggaaaacggaaaaacgggctgggataccatttacggtctgacacgggcgcttcaaattgaacttggtatttcagaacctgccgataacttcggcccgacgacacaaagattgtttaagccgttgaaaaagcaggctcccgattctaagccgacaaacatgaattacattctgcaaggggcgctgtggtgtaaaggttttaaccccggcggattttcaggcgttttctatgaaaataccgaaaacgctgtaaaagagtttcaaaaagcggccgggctcactaagcaagacggcatcgtcacggcactcattatgaaggccttgctggatatgagcgcttttcggttagtagcgggaggcgacaaaaaaatccgccaaatccagcagaacctgaaccgggattacaatgactacatcggcttgatgccttgtgacggcttatatgcccgcgatacaaacaaggctctcatttatgccctgcaaaaagaagaaggcatgagcacaagcgtcgccaatggatttttcggaaacggaacgaccagcttatgtcctaccttgactcccggcgattcacggacaggctttgttttgattgttcaatacgcgctttactgtaatggggaagcgtttgatcccggtgaattcgacggaaaatacggcgtcggagttgtatcggcagtgaaagctttccaaaagtttatgtgcctgccgcagactggttatgcggacatgccgacgattaaagctttattatcaagctcaggcgacacaacccgtgttgcttcagcttgtgacaccgctgccattttgacggcagatacggctaaaactttgcgtgagaatggctataagatcgtgggaagatatctgaccgggaatgtgcggacaagcagcggactgacatcgaaagcattaacgtcaaaagaactctccactattttcaatgccggcttaagcgtgtttccgatttatcaggacggcggctatgaatcttcttattttgtaaaagaccaaggaacgagagatgcgtacagcgctgcatcagccgcccgaagattaggctttccgtcaggaacgaccatttactttgccgtcgatttcgatgcgtatgattatgaagtcacagataaaatcatcccttactttcaagaaatcaagtcagcttttatgaaaatgcaggcgttctcaactgcgccgaaatatgaaatcggggtatacggaccgagaaacatttgtatccggacgtcagaagcaggtctgaccaaatatagttttacggctaacatgtcgaccggattcagcggcaacctcggatacccgatgccgaaaaactgggcttttgatcaattttatgaaggaacgatcggaagcggagcgggaaaagtcgccattgacaaagacggatactccggaaaagactcaggtgtaagcagcgtccatccgccttctgatcctgtgtatgatgcaagactgcgcacactgacggacattttaacaaccattcctgctttagaaaatatatcgaatcttgcgaatgccatgtttgaattcgacaagacagaaaccatttatgcatcacctgaaatggatattcttttatctacttcacttttggcaacagtgccaagcgaaggttctcccaacacagttaccattacaaatggcaaaccgggagcttatattaccggtctgatgggagattcacaagtctcttttacagcatcacaaattgattcctatcaaaacctgcttaacagtctgagcttgtcagtccgcaacggttatttagaagtgtatgtcaatccggctgcgggatcgctgaatattcaatttaaaatttatacacctgatattccggtcggtgacagtgctacaactggactaacaactaccattacatttaaaataaaacaaaagagtttcaggttgccggattccgaagaggtgtactccccggattgggattctgtcgtgaataccatggctattgcaggcgcaggaattattgttattgtagggatcggtgctttagtcgttttagcacctgaattaggaggagttgcagccttgttcagcacggttttatcactatttctataattgaacaggcaagctccttgctccaggaatgctcaatgagtattcttggagttatttctaaaggaggattcgcatgaagattgatatgcagacatacaaggaaaccgctcaaaaaatagaaaccgatttgattccgcgaagtcaaaatgacgaagaactgcttacatacttaatgaaacaagattcgctcacactgaatcaaatgaaaatgtgtttcactgaaccgcccctcacctttcaacatactgtcaaaattgtatgtacagtcacattcatcacgttatatatcttttttttcagcactcattttaatgatttgattgaaatggctctgcagatggttttcggtctggccggccttgtttggattattgctgtatttccgttttcaagaaaaatccaagtgtctgaccgtttcagacaaaaatctgaaaacacccgtatcaccggaatgatagacttcgtcctcgaacaacgatacaaagacatgatcagttaaaaacccctctgcttaaggggtttttttattatgcaaacccttcaccccccttatcagaaaaggctcttcccctttggaaataaccggaacacccaatttcgttttcaatataatgaggtagtggatctgcaaagaaagaagggcgacatgatgggtatcattaatggaaaaatgttcattgaccgattaaatcagcttggaaatgagatttggctcgatggtgaaaagatcgagggacagatttctgaacatcccgcatttaagggccttctggaaacgaagcgctctctttatgatttgcaaacgaaaccggatatgaaagatcaaatgacttacagtcttcccggtaaaaaagaacgggcggggctttcatacctgcagccgaaaacgaaagatgacgtaaaaagaagaagaaacatgttcgagctttgggccaggcagacgcatggaatgatgggacgaagcccggattatatgaataccgtgctgatgagcttcgcctcctctgccgcgcttttgaaagaccgcgagcattgttttccggaacatgttcaagcgctgtacgaacgcgctgctgcacaggatctttcttttacgcacacgtttatcacccctcaggtgaatcgttcacaaatgggtgtaaacgtatcgccgacacctatctcggcaaaagtcgtcgataaaaatgaaaaaggcctcatcatacacggcgcccggattttagccacacaaggcggcctgacggatgaagtgctcgtggtttctctgcctaaaatgtattttgaatcggatgaagcgttcgctttttcaatcccttccaatacaaaaggagtaaaattcatctgcagggaatctttcgtactcggaaaatcagcgtttgattatccgctcagctcaagatatgaagaaatggattctatcgttgtatttgatcacgttttggtcccttgggaacgcgtattcttttataataattacgaggcggcttttgattttaatatgaaaagctcttttaacgccttcgcatttcatcaagttatcacgagacaaattgtaaaaacggagtttctcctgggcctcgcccaaacgcttgtcgaagcgatagatgtgggcgaatatcagcatattcaggctaagatggctgaaatcatcaccggtctggaaacgatgaaagcccttttggaaaagtcggagaatgatgcggaaacagatgaatggggttatatgcgtccgagtgtcactccgcttcgtgtggtcagcgcgatttttcccgacatctacccgcgcttcacggaaatcattcagctgatcggggcaagcggaatggtgactttgccgactgaaaaagcgttccgttctgacatcagaggagaccttgaccaatatttgcaggcggccgaattgaacgctgaggaccgggtaaaagtgttccgcctcgcatgggatttgaccatgagcccctttggaacaagacagacacaatatgagcggtacttcttcggtgatcccgtccgcttaaccagccatctgtacagaagctacccgaaagaagaacagaccgcggtcatcaaggaattcctgcacattcataaataaaacaaagcagagagcacatctctgcttttgatagctggatcggctgccgccgatcctattttttattttggctgatcaccaccatcgtaatatgcgataacgcgaaagagacgagcgtgtacacgacggcccacccgataaacgagaaattcaatacggtaaaggtgcatataaggcaaacggccaaagcggcagccggcataatgaacgcgtttttaaacagatatgttccggcgactgacaagatgatgatacaaagcggcagaacaccgaacgcaaaatccaattcatcaatcaacagatgcactcccttcgcttttcttagttcggcctaacacatcttatgcctgagtacaaaatcgagtacttcaaatctttcgcgctccggctgatattccctccggttatttattcaaaaaaaagaaaactttccttaaagcgtttacattcacgtcagactgtgataatttaagaaagcgctatcatacacaagttaatgatttttggatggagatgaggagaaccaggaaacccctccctttcacaagggtgatttctggttctttttgtcattttcaaggaaaggagtcatacatacatcatgatagacgttcagcaaaggggaggatatgatgtttcaattgttcaagccggctccgcatattgagagattggatgattcaaagacggatgcggcctataaacggctcaggctgcaagtatttttggggattttcatcgggtatgccgggtattatttgcttcgcaaaaacttcgccttcgctattccttattttcaggaacaagggttttcaaaaggggaacttggcttggtgcttgcggccgtatcaatcgcttacggcttcagtaaatttattatggggatggtgtctgaccgctgcaacccgaggtatttccttgcgacaggtctgtttttgtcaggtgtcgtaaacattttatttgtttccatgccgtgggtcacgtcaagcgtgacgattatgtttatttttatgtttattaacgggtggtttcaaggaatgggctggccgccttgcggacggacgatggctcattggttttccatcagtgaacgcggcacgaaaatgtcgatatggaatgtcgcccataacataggcggaggtattctcgccccgctcgtgactctcggcatcgccatgtttgtcacttggaaaagcgtatttttctttccggcgattatcgccatcgtcatttcatttgtgattgttcttctcgttcgggacacgccgcaatcctgcgggcttccgccgattgaagaataccggaatgactatccgaaacatgcgttcaaagaccaggaaaaagagatgacgaccaaagaaattcttttcaaatacgtgctgaataataaatttctgtggtatatcgcatttgccaatgtctttgtttacttcgtgcggtacggtgtcgttgactgggcgccgacttatttgacggaagcgaaaggattctctcctgaagactccagatggtcttatttcctttatgaatatgcgggaattccgggaacgattttgtgcggctggatcagcgaccggtttttcaaaagccgccgcgcgccggcaggcgtactgttcatggccggcgtatttatcgctgtattggtctactggcttaaccctgccggtcatccgctcatcgataatatcgcgctgatcagcatcgggttcttaatctatggacctgtcatgctgatcgggcttcaggccattgaccttgcgcctaaaaaagcggcgggaacggcagccggcttaaccgggtttttcggctacatcggaggctctgctttcgccaacgccatcatgggttatgtcgtagaccgctttgactggaacggcggctttatcatgcttatctcctcatgcgtgctgtccatcgtcttcttggctatgacgtggaatacgggcaagcgggcggagcatgtgtaagaaaataacataaaagattaatatttttgcagtacagcatttacaacgattttctacactagagacagatattgatttttaagggggaagaaaacatgcggaaacataagttgtttgctttggtattgctttcattcggtttattgtcattcatcgtcacgcctgtatcggcggcgggaaaaggaaaccttttgtctcctgacagaattttaaccattgcccatcgcggtgcttcggggtatgtcccggagcacacgatcctttcttatgaaactgcgcaaaaaatgaaggctgactatattgagctggatttacaaatgacaaaagacggcaagctgatcgttatgcatgatgaaaaactggaccgcaccacaaacggacaaggctgggtgaaggatcatacattagccgagattcaaaagctcgacgccggctcttggttcaataagacctatccggaaaaagcaaaaccgcaatacgccgggcttcgcgttcccacacttgatgacgtgttaaaacggttcggcagacatgcaaactattatattgaaacaaaggcgcccgaaacatatccgggtatggaagaaaaactgatcgcttcactgaaaaaatacaaattggcaggtaagcatgcgaaacttggacaagttatcattcagtctttcagcaaggacagccttctgaaaatcaaacagctcgatccgaaacttcccgccgtccaattgcttgaagcggaacagatgacgtcaatgactgacgcagatttaacagacattaaaacatatgccgtcggaatcggaccggattacaaagcgctgaacgctcaaaatgtccgaaacattcgcagccacggccttctgcttcacccttataccgtgaacagcgaggcggacatgcgccgtctgctgaattggggcgtaaccggtgtgtttaccaactatgcggatatatttaattttgttaaatctaatagggatcaataggtttacgaatctaaagatttcaaaacaaaaactgcacgtatatcgcgtgcagttttataatattaattttaaatatttctctctttaaataacggtcttagtatattcttaacttttgctttaatagatttgcccttataaataacaggaacactttgttgcaaatgaccaataatcacttctgcactcttttttagcttaatttgttttaactcctgcttagttacttcaaaactaaaatcatatgacattttttttcgagtagaatctttaagtaccacatcaggtttaaacacaagaaaccttccaaaattcacctggaaagaaatctgttctccaaaacttaaatctgtttcacaatcaaaatgtcctttgatcctagaaccgctgcaggttaccacaaaatttttaaaatgtaacatttgatgtttaacaacaagagaaagattaccccatttagttagatacgagtttataacgataggttctttacatccttttgcaatataagaagcattttttaaataaacgatttctttcgattttaatctcaatgatttcgtataatcttctatcttactaattaatcttaaatctaatataccatcttcgctatttaagtgaagcaaagattctataggaatatatgcgtaaaaataagtaactttttctttttttataatttgcgtatctatttcaaaaggatattttttttcaaaaaggcttctataagctggaaatgaaattgttttatctttttgttctctcaaatagacttcgataaataaacgctcatttgaggagtcaacatgtgaatgataacaaaaaccctctaacaaaacggcattctctaatttctctatttttgttatttctccttcaaatttattattacgatgaaaggaaatagactcatgcaaggccaaattgtatgctaattctggttttggatagaccttcccatgttgtactaccatgttaccaggttgtttttcagcgtaccagaaagcaattaaatcctccaattgtcctttctcaattaaacgtaataagagtttatggcgggaagaaaactgctggtaataatctaagtattgatacttgtcaagcattttctttaacgcattaaaaatatagattttatcttcaattagaaaagactttgaaatcagagcgcttaactccacttccataatcctttcccagtaatgaaagaaaatcagccgttttttatctgtttcaaggttcagtaattcaatagatgccaatgtttcttcgattctgaacataaaacttttacctgataatggtttcttagtaagttgaacccttcctatcgtttgatgattggtcaaataataacatgggtaatctttaacaagggctatggaatttgaatatgcatacgcttgaatcataaacggttgatcctctcctagggagaagtgttccggaaaacgaatattatgtttaattaataactcccgtttaaatagtttttgagcactcatcgtaaaaagagcattggaaccagggaaggaaaaacaatctggattctttttaaatacaaccacaggaacacctctattaattccttcataacggccgataactatatcactttgatactgaactattttttcttccatcttttctaaagcttcaggtcctaaataatcatctccgtctagaaaataaatataatcacctgttgctgcttctatagctttgtttcttggtctgccaggtgcgccgctattctgctgatgaattactttaataaacttgtacttgctcatgtattcatctaaaatattaccgcttttatcagttgaaccatcatttacacagataatttcaagtttgtcctctccaactgtttggttcactacgctatcaagacaatctctaattgtgttttgatcattataaaccggaatagctacagtaaatatcatcttttttctccttaattattgtttcctatataaaaacaagtccagaattattcgaatccaattttaaaagtttaccataatttctttcttttataaatatggttaaaaattttaatgtgtttttaaacctagccaccgtaatctagataataagatgaaatattcccagtaattaaatcggattttccataagacccctaacaaatgttcaaaataaaaattagtacaggctttgattcatttctctttgaatttggaaagctcacttcatttaatcctaattacgttactttgcggatttttaatttcacccataaaaaaacacctctaagtcgttttcaggtattatacctgcttttcaacttaaaagtgcctttgtcctgcgcttacaggctcagactctcaaaaacttcaacttcttataacctactcttttccggcagcggcttccgcctgtccgccttttaattgatcgttgattgctttggcgtctttcaaatactcagtcttgaagccgctcttcagcgcccacgcatagaaggcaagggcaacgattgcgatcagccccatatcccacccgtacggaatgatgttcagaccgccgaatttttcacttccgagccatgaaatggtcatcatgccgagcagatagacaaccatccagacgccgcctttaaagtttctgcggaatcctttccacttcgctttcgcttggtagtagaaataaatcggaaggccgatcaaaatgataaacagcacctgccctgttaacggccagcgcgcccaatacagcacgagagacgcgaacacgaagccgagcggtgcaaccacgctgaggcctttcagacggagaggccggtataaatcccccgccgtccgccgcagcgtcatcaccgtcacgggacccgtgatataagaaatcagcgtcgcaacggaaatgatttcagcaagcacaccccatcctctgaataaaaacagaaagataaacgatacgatcaggttgaaaatcatcgcttggcgcggcacgccgtacagcggatgaagctttccgaaaatgctcggcatatatttatttttttccatgccgtaaatcatgcgtgacgtcgtagcggtatatgtgatacccgttcctgacggagatacgaacgcatccgcataaagaataatgacaagccagttgatattcaatgcgatcgccaaatcggcaaatggagagttgaagttcagatgactccagccgtgaacgatcatggaaggttcaaccgcaccgataaatgcgatttgcaataggacgtaaatgacggttgcgaccagcagcgaaccgacaaccgcaatcggaatcgatttgccgggattttttgcttctccggccatgttaatcgggctttgaaacccgttaaacgcaaatacgatacctgatgtggccaccgccgtcagcacgctcgcccagccgttcggcgcaatgcttgaaccggatgtgaagtttccgccgtgaaaaccggtaaacagcagcgctccgattgtcagccccggaataataattttaaagatggtaatcaatgaattcgcttttgaaaataagttaactgtccaataattcagtaaaaagtaaataatcagtaatacggatgcgaagccgagcccctctcccgtaagagtgccgttgtgaacgagattgcttgtccattttgcccattcccacggccatgagctcatatattgaacagacgcaaccgcttccaccggaataacggaaacaatcgcaatccagtttgcccatcctgcgataaatccaataaatgatccatgagaatattgagtatattttaccattcccccggcttccgggaacattgaacccaattcactgtaagaaagtgcgataaacaaaataacgatcataccgataatccaggaaataattgcggcaggtcccgcaatctgagccgcccgccacgccccgaataaccagccggagccaatcatcgacccaagtccgaccatcatgagtgcaaacgttcccattctgcgatgtaattgattcataaagttaacacctttcaattaaaatatgactccaacgctatcatatatttataatattattctgaaaatagttttgtcaatctttatcgcattaaagcggaaagccaaaattacccttcagatgtttaaacagccgttaagcgggaataactactgcaagccagaaatagaaaggagtttttatcgtgaaacaaaaactgctcatttcaggacttgctgtgtcgactgtcggagtgacttcctacctgctcaaagataaatcaaaccgccaaaaggtgatgaactttatccgcaatatgaaaacatcgctctccgggaagcaggatattgaatcattccccgtcaacaaagcaggcaacccgcatcccgaagatattgaagataacaaaatggtatccgaaggctccatgtacccggttcaatattatgatgacaagaagaaataatctgtccccgggctgcccggccgtatcaaacggcggcagctttttttatgcagacggcgtttgatagaaccgccaatattggcgcgagcctttatcccgaacggtaatgcccagtttggatatttccgctttcagttctttcgcatcagccttttcctcctctttcagcgccttttctctcgcttttaaaagagcatttgccccaggctccaaatccggcgtgtccggcacccaccgtttatattcttctttaaaaggatcttccgtccccagccagacatacccatgcgcgcgaaacgcatcagccgctttttcaaccgccggctcaagcttctcccgaaaaagctcctgtccttccgtgcctaataagacaagatacttcccatccgtaaacacaccggaaatgctgtctttcgagtacacgctttcttcattatatatggttaaggacacctcgctgtccgtcacgaccgccgtaagacattctttaaaaacagtccgcgtcagctacattcccccgattaagccgataacggcgatgacagccgcagccttccatccgtgaaaagaagcgatcatttccagcggcccgataacaggcagccaatccaatgttacggcccatttcgcaatgaccggcagaaaccatccgatgaccagccccaatattggcggcaccagaaaaaccaaagctttttcaaccgatgataactcaagaaccgtctgtttttttatttcgttcatgtttctcctccgtctgtttttttcacaactatccattatacaaaggtttggacgatcctgtaaactgtttccaaaacaataaaaagcctcccgaccgccgggaggctttttaaaacaggagctcatatacttcattcaattccatcgtgcgcttctcatcctgctcgttctcagcatatttgatttccttttcaagcacctgattcagcgcatccatttccaaatcattaagatctttcacaaactcgccctcatttgcataatgcttcacctgaagctttttataaatccctcggcacacatcatgctccaagtggttcgaaagcgactcgcgcaaatatccgagtgtcctgtccatcatgtaagccctcccttttctataggaatagcttcccggaaagagagaaaaactatacatgaaagcaccaggctaccgtcttaactctgtacctgaatggagaaaaatccgctgcttaacggcgtgtacggcccgttcagccccgttgcggagaaagagaacgttcctgaactgacataagaaagaggaacactgtaatatttaatatagcctgtaacgatattgccgttttttgtatattcatcttcaagcgcttttgacgtaagatttgtaatattcgttccgttgttaaacgcctggatcgtgttattgttcggatacccttggaaatatacggctaaataacccgttgtacccttcatcggttttgatgcgctgatttggttcggcccgatattttcccattggtaactctgaccgtcagacgtcacaccgataatacggatttgtgttaaagcaggagccggcgccgcagacgctgatggagcccacaacccgctcacaagcaacaaaacagcaacggccgccgcgaatagcgtaacgagtctctttttcatgtttcttccccctcttattcttttcgtagaatcctaaactattttacacgatttacaaggaaaaagattacattttataaaagagtccggaacactttgtgaactagatatgaaacgctcttgaaacgccgttgatcatgagaaagatgccgcagattcttaacacgactctcgaacttctgtcatctttaccgaaaaaggtttttccgagcctcccgatccatacgttcattgcggctcccgcgagcaattctatgattccgatcatttctgccatatacaaagcagccacccttctaaccgttttttttcatatgacggcttatcatataaagtgataagaccaatgacgctgcaccggcggcaagaaacaggctcagcggcactatctgcatgctgcctccgccattgttttgaaatgcgccgatcgcccatttttcaggggtaaacaacgacagcatccgcatgtactccggagccgcgtctaaagtgaagaaagcccctcccaataaacccgtgacagctataaaaacggaagcaagcgacgtgaattgcttttggctcttcatgaacggtatcacggccatcgttacagcagtcagcgcaaacgagcaggccgcaagcaccgctcccgcagcaaaaacatgatcagcaaaacggatatgcagcatgaatgttccggcagcgaggatcacgataatatggagaagtccgaatagatacgccgccgcaaacttagagattgcatatgccgtataggaaacgggcgtgcttagcaatctgtcatatgtatgattttcttgttcatctataaatgatcgcaggctttggactgcaacgaaccagataaacatcactaaaaatccgataagtctgtcggctgcctgtccctcttcataaacgtgatggcggtcaacattgacggcggaatgaccctgaatatccttcaagagatcagctgccgcctgctttccgtcggtgtgcagcgtgcgggatatcacttttgcatcgcggactatttttttcagcgcgcccgcctgctgcgcaatcagctgctctgtcaaaacagcatcacccttttcttcattctgaataaatgaaacgttcaattcatctccggaaaataatgtctcttcaaaatgagagccgatcagcaatccaaatgatacatcctgatgattaacctttgtttttaatacgtcctccgtgaccttcgtgacttttatatggccggctgtctgaatcattttcataaattgcgctgaataggcgctctgatcctcatcagctacatatacttccttctgctgactgccatccgcagaaaaggaaaagaaatatgtgagaaggagcggggcggaaatcgtcgcaaagatggcagcccgattttgcagcatcagtttcagctgatgtctgatcatgaataacagctgcgtcatgaaacagcctccttccgtttaaacacccagatggtcaaacataaaaacacggcgccgatggcggcaagctctgccaaatccgccgcaataccgctcagaccggcatgctgcgtgacactgacatagctgttgatcgctttgccgttcggtatcagctcctgcacgattttcaaaccggcaggctggctgtcttttgcaataaaacttccgcctaaaaaactgaacccatatagaataggagccgccatgcttgagacggtctcatggttttttgcagtaaacccccaaagaagcacgatactgccgaccgcaaatgaataaacgatcgtaaccagcaatatttcaaacaaatttccccattttacctgatacaagatgctgcttgcgatgatgacggcagccatttgcataaggatggcaagcatgattcccaaaagcttacccgccacatactggatacgtaaaacaggcattgattcgattctgaataacgtgtgctgctgtctctcttccactatcccgtgaatgagcgcaaacgcggtcataatggagaacatgacgaccattgcgattgaataatactgcatcgcatcaatcggagccgcgtgattgccggctgactgtttcggaatggtgacagcctgttcacgttcacccgaaaggccgctgatgattttgctgacatctccctttgacagatgtcccgacttcttcagcaccgctttttcttcactgatctccgcttttactctggtgacaaacgaatcggccatcatttccacaatgtctccgtttacagagccttgttggtccgagatgactttgatacttgttttttcattgtgttctgccgcttttgcaaagcctttcggcacgtatacaaaaacggagactttgccgctttcgacaagctgtttcccttcttggtaactgcctatgtcttttacagggatgagatcagtttgtttcagcacgtcattctttaatacgtcgcccaaagaactctccgcgtgatccgcattataaaacgcggtctgaaatggcttcactttcgaatcgccgtgaaaaaccgttcctaaaataaaaatcatcagtgccggaaacagaatcagttttatatagaaagactttgctccggccaataaccgaaaatctaataagatcagcctgaataatattttcatgacgcccccctatgaatcccgcagcgttttgccggtgagccggaggaaaatgctttccagattggcttcctcgaaatgaatgcctttaatggtgataccggttttcctgatatcatccgcaatatcaaggatattgcgatctgccgcagagacgagcatcgtaatggtctgctggctgacagcagcctcggcaacaccgggaatgcggcggatttttttaacggcatcatcattcagcccctctgcattcacgatcagggtatcagaggctttggctgactgcttcaattcatctttcgtcccgcaggcaatgattgagccgtgatccatgatcgccgctttttcacagaggtattcgacctcttccatgtaatgactcgtgtagatgacggtcatccctttttcttgatttaacgtcttcacggtttcaagaatgtggtgtctggattgcggatcaattccgacggtcggttcatctaaaatgaatagtttcggttcattcattagcgcggccccgatattcacccgtcttttcataccgcctgaaaactcagatatcctttgatttcgctgttcctgtaattcgatgatgtccagcacttcatcaacccgtttacaaagttccttaccggaaagtccgtacagactcccgaaaaaagccaaattatcctttgcgcttaacgcttgatataaagcgatttcctgcgggacgactcccatcactttttttatggccgcaggctgctcctgtaatgaggttccgtcaatgcagattgttccgcccgtcggcgggagcacggtgctgatcatcgacaccgttgttgatttaccggcgccgtttggtcccagcagaccgaatatctctcctttttcgacgcgcagtgatatatgattgacagcggtaaaatcgccgtacttctttgtcaaatccgttaattcgagcattcgtgcagcactccttgtgtcatgtctgcacttattctactctcggcaatccttgttttctattcactttcgtactcgatatgggtattactttcgtcatgtgtttagtgataaaaagggagagaggagggtgaagcggggttatagcaatttttgcaaatataaagtaagctcggttctgtttgacacttcaagtttatcgaggattctggatacatagtttttcacagtgccttcagtcaaaaataagtctgcagcaatgcgtttattgcttttgccttccataatgtgtttcgccacatcaagctctctcggcgtgagaatctccgtcagctttgaccgcggctcttcctgcaccgcagggatctccatattgttcagcgcttttacgacggaaaccgtgattttgggattcagcatcatcttcccttcataaacggcttgaagggaggcgataatttcatctgaatcagcatccttcaagagatagccgtcggctccgcttttcagcccggcaaaaatatagtgatcatcctcaaacgttgtcagaatgatgacttttacggacggatatcgcgcttttaccgcttttgtcgtttcgattccgtccataccgggcattctgatatccatcaaaatcacatcggtttcggattgagaaagcatccggagaacctcttcgccgcaagaagcctctcccgatatttgaattccttcgtgaagactcagaatcattttcaacccctctctcacaatggactggtcgtctgcaatcatgacattcacttgattattcctccttgcatggaatccttattttcacgtcaaaacccgtttccttcccagacgagaaaacagcctctccgccaagtgcggccgctcttttctcaattcctttcagaccatttgattttatgatcgttccgcaggctgagccgttattatgaagatgcgccaatatcatgtttcggtttttttgaatccggacagaaacatatgaagcatgtccatgctttatcgcattcgtaatcgtttcctgaacggattgataaagacaatgcttcacatccggctgttccgcttctatggccgcgtccatctccagctcgaagcatatgcctcccgcctcttgaaaatggctgaaaatgtcacggagctcttgctcaaatccccgccccggcaaagagccctgcagcagcataacggcctggcgaagctttaaaatggattctttcgtaagatcatgcgccttatgaatgatctgcttcactttgtccggctgatgcccggctgtcttcccggcaaattccaaattcattttcagagcagccagataatgaccgagagaatcatgcagttcctgcgcaattcttgttctttctttcgtaacggccagttcctcaatccggtctgaatattccttcagtgtatcattagcgatcttcagctctcggttcagcaattcaaccttcgacttctcctgcaggtttttccgatataaataaatcaccgcaaacatgatgaagtatggcggcacgatatcactgacacccgctccgccggcgtataaagctgcggcaaatgcggcggcattcatcgttaacaaaacagccgaaatctccttatcagtaataagcacctccgccaataaaagcaccattacggcctgtgcccccacactatagacattgtacaaaagtactcccgcgataacgttgctcaggagaaaagagccttgatatacagccggccttctcttcatatacagcggccgcaggcagtcattagccgtcagcataatcacgagcacagacaaaaaaaccttcagctccccccggccgggaggaagctgaagaatcgcatgaaagattgatagaaatgcaaaacccctgatcagtaacttcgtatgtgcaatcttcatcgtattctccttacaaatgagcggcggctttccgctccacgttcagcacatcatacagctcatcaagcgaatgaatctcgtatgtcgggatgattccggactcatttgctttctttccgggattaaaccagcacgtatccattcccgccatctggccgccttttatgtccgcgctcagtgaatcgccgataataagtccgccctcggcagaaaaaccgggaattctcgcaaacacgtaatcaaagtattccttcatcggcttttgaaaacccgtgtcctcagatacaaacacatctttaaagaacggatacagaccggagtcgcccagccgcttatattgtgatcttgagacgccgttcgtcacgatgtataaatcaaataaaggactcagccattcaatcagctcataagctccgtctatcatctggtgcccttcttctaagtattggcggtacgcctgattcatcagcacgccgtcggtttcgaggccgtattctttaaacaaaagggcaaaccgtgtattgaccacttcatcgcgggtcatttccccctcttcaaacgctttccacagcccctgatttaacgctttataacgggcttttacctctgccgtcaggtccagctttgaaccttgaaacaatttttgaagagcatcggtttctgaagcggtaaaatccagcagcgtattgtctatatcaaataataacgtacggtaatgactcatcgatgtttcccccggttctgctttttttaaccagtataccactcgcggacaggccgaaaaagacacccctgtaagagaggtgtctttttgaattatacagcgtcttctattttcgatttttcaccaggcatgcgcttgccgataccgaacgcataatagctgaccgtcacaatcgccaggaaaatcaccccgacaaccaaagaaatccgcgtatctttgttaaaccacatgccgatcaataccatgagtaggaaagcgatcgtcaaatagtttgtaaacggcgcaaaaggcattttaaacggatgcttatcaagctcagcgcccttcgctcttctgaaaccgagatggctgattaaaatgacgaaccacggaatcattcccggcagcacactcgcgctgtacacatagacaaaaattttcggaggcgcgatgtagttcagcacgacaccgatcacaagtccgattaataccgcaagtgtaccgaatatcggcacaccgctcgaagaaactttcttaaagaatttcggggcctgtccgttcacgcccaatgtataaagcatgcgtcccgcactgaatatcccgctgttgcatccggacatcgcagcggtaatcacaacaaagttaatcaaaccggccgccgccgtaatcccgactttcgcaaatgtcgaaacaaacggactgccgagtgagtgaagctcattccacggatatacggtaacgatgacgaaaatcgcaccgatgtagaaaattaaaatccgccaaataatactctgaatcgcgcttcgcagcgttttttgcgggtccttcgcttctcctgccgtaatcccgatcagttcgaccccttgataggccgcaacaaccaaagacaaggcaaagaaaaatcctgaaaaaccatttgtaaagaaaccgccgtgcgaccataaattagataatccgatcgcatgccctccgttaccgaaaccgaagaaaataatcccgattccggccacgatcatcagaataatggtgacgattttgatcatggcaaaccaaaattcaaactcaccgaaagattttaccgaaattaaattcgccgcaccgagaatggccatggcgataatgccgggaatccatgccggcagatcaggaaaccaatatttcatatacgaaccgacggcgataatttcagacatcccgacgatcacccattgaaaccagttgctccacgccgtcatatagccggctaacggatgtatatacttatggccgaatgtcgcaaacgaccctgtactcggctctacatagagcatttcgcccatcgcacgcatgataaaaaagataaagatacctgagatcgcataagccagcaggacagacggccctgtccatccgatcgtgctggatgaccccatgaataaaccgacaccgatcgtgccgcccagcgcaatcatctgtatatgacgcgcgcttaagcctctctttaattctttgtttgccacttcgcttcctcctcttaacagctctgatatatgtgaaataatgaagcagaaggtgcacctgttgaacctaactcgctcttcatttcccgcaatattagaaatattctatctttctattgttatataatctccaatttccttattccatcataataaatttccgtgaaaaatacaattgtttttttcaggtaaacaccttgcaccctaaaccaacagactaaaaataaagcgctttcatttttattgaattatgaatattgagataataaatgccgcagcctccgagaaacaggatgtccctggagaaacatgttccgccccctattcaatattatttttgctaagcagaatggcgtaaagtcttactctcttccattctcccttgtatacgccataatcctgcttaacccggcaaaaatcatgcattaatcgataaatgcctcattcagccgcagcaaaagccggccgaacatttctttttcatcgcctgaccaatcgtcaagcatatgttggtatcgatcaagacgcatctttttatcagcttttaacctctgtttgccaagcttcgtaatcgcaaacagactgacccgcccgtcagaaggatcggaaaaacgctggatcagctctttcgactccaaggccgctgcctggcgtgacaatgtggaaatatccagcttaaaagattcggctaattcctttacacgcgccggcccgaattcatccagctgccgtaataataaatacgcagccctttccagatgtccgattttacggtcggagttatcaagataaacagctctcctaataaaagtggtgagctcatattcaattaattcaatcggatcttgttttgacaacagcctcactccttacaattgacaacagcaatattagttgtataatacaaacatatgcacatttactcagaaaacatatagaaatattttgcatacatatatttgtatagtacaaatatatgcgcaaaaagtaaagaaacatatcgaagcatcaagaaagggggaagctgctcttctccaaagaacagcattgtcgtgaaagtcatacgcatcatcttgcaaatcattattttattcgcattttcctttatcgggggagccgttcagcagttctttcacctgcccattcccggaagtatcatcggtttgatcctgctgatcatatgtttatcggttaagatcattcccgtcaaaatgattgaagacggagccggatttttgctgtcttttcttccgctgttattcattccggccatgacgggcgtcatcaattacccgtcactgttttccgccagcggggctgctctgtttctgatcatcgtgctgagcaccatcgtcacaatgattgccgcagggtacgccagccagctgttagagcacaaagccaatcagagaaaggagaaaaagaagtgcagcaagcatgtatcgcaatccttataattttgttcacggccgccgcctatctggctatggtgaaattatatgtgcgctttccatatccctttctcataccggttttgacgactacgattttcattatcgccgtgctgcttgtttttcatatttcgtataaagactatatgatcggcggacaatggatcaattcactgctcggccccgccgtggtggctttggcatacccgctttataagcagcgccgggtgttaatcaagtatatgtttccgatcatcggcggcgtgttggccggtttattctccggaatggtcagcggcctgctatttgcagagctgttcggcatcagccggagtttgattttgtcaattatcccaaaatcaattacgacgcctgtcgccatacagattgcgtccggtatcggcggtgtcccttccatgacagtcgtgttcgtcatgatcgcagggttttccggcgttatcttaggaccgctgcttctcaagtggatccgcatccgcagctcactcgggaaaggaattgcattcggaagcgcttcccatgcgctcggcacctcaaaagcaatggagtacggagaattaacggtctccatgagttctgtttccatgacgctctgcgccgtgttaggatcggtcttcggccccgttgtagcatggatgtttcaaatttaaagctggcggttctccgtcagcttttttcatgtgcggatcatctcatttccttccattattacgtttcatttgtaagaataatggtaaagtagaaaacaaggagggatttaatgatgactgggacaattccgcaaaagaaactgctggatgggacaagcattcccgcgatcggcttcggtacatacgctcttaatggaaacaacggcgttcatgccattaccagcgccattgatatcggctaccgtctgattgacaccgcttataactatgaaaatgaaggatcggtcggagaagccatccgcagaagctctgttccgagagaacagctatacgtgacgtccaagctgcctgggcgctaccatgactatgacaaagctgtacaaaccatccaagaatctttataccgcgccggtctggactactatgacctgtatctcgtccattggccgaacccgaaacaagaccgctacacggaagcatggcaggcactgattgatgcgaaaaaatggggtctgatccgatccatcggcgtctgcaatttcctgcctgagcatatcgaacggctcgaacgtgaaaccggcgtaaagccaggcatcaaccaaatagaactgcatcccgcttttaatcagcagcagcagcgccaatggcacgaagaacagggcatcgtgacagaatcatggagtccgttatcccgcgccggcgaagtattgaacgatcaaaaactcggacgaattgcggacaaatacggcaaaaccatttctcaagtcattttacgctggcatatccagctgggcgccatcccgattccaaaatcagcatcgcccgagcgccagcttgaaaacatctctgtttttgatttctcccttgatgaaaacgacatgaaacttatcgattcgcttacccgccccgacggacgcataaacggccaagacccggcggagtatgaggagttttaagaaaagacataaagaaagctgacggcatcatttgtcagctttttcaccttttgctctgggatagccaagactgtgaaactttgcagtaaaggctggaaacacacttatcctattataaattgatcagttgctaaaattcttttttatgatatatagctgcggcaatgaaaaatgaaatgatatataagataacgccgatcatgagatatataatcgggacatataaagaaggatttatgtgcaaaaatgacagcggtacttgttctgttgcatacccaacgacactttgcaatccaaaggtagcaaaaagtccccccattgcccctccaatcacgatagcatcagacttttccgggcctatcatgtagagaagaggataaacgattgcaccggcaaagagaacgatgaacgttccaaaagagacaatattaaatatgccgtcaattggttcatcagaacccaggctgtatacaaggaaaataccataagatattacagctccgatcacaacaatcaaaagataaaagaaatagtgactttgaacaatatttgttctgctgaccggtaaagtcaggacatacctgtcatagccagacttgctctcatactttataacctcaagtgcgggcataacgacaaacaaaataatcagcattgcaacaaaacgatgcattgaagcatccccaaaataaaaaatgactgctgataccaatatggccaaccccgtgtatgcaaagaaacttcgataaaccaagtaatagttagtcagtaacagacctttcaatgttttcactcctcgttaaaaagacgctgatttcttctatggaaagggtgttggccgttacgccattcggcaatttctgttgatccgatacaagcacactccaataagatccatgattcctttttgctagaacgatatcttcgtcaagctcagccaatcggccctcatcaacgtctataacagtatagctttcaagaaccttatctttctcttcatttaataaaatttcgccatctttcataataatgatatggctggctatcttctcgacatcagtcataatgtgcgatgaaagtaaaatacccccgttgcttttactcacaaagctttttaattcatttaacagatcatcccttgaagagggatcaagccctcccgttgcttcatccaggagtaataattttgcattatgcgacaaagcaacagctacggataacttcattgacatgccgcgcgagaatgtattcacttttttgtccataggtaaagagaaagaatgaaccaaccggtaaaaatgatcttggtcccaagcaccgaatagtttcttaaatacatgattcagctgctttatcgtaaggtgcgcaggaagattcatcgcatcaaatacgaccccaatatcttctttgaactttatatgtttatccagattctctttaccaaagattttcactttacctctatcctgagagattaatcctaatatcgttttaaatgttgttgacttgcctgcgccgttatcaccgataaaaccgacaattgatccggcaggcacattgaatgtaacatcctttaaaacagctttatgaccaaaagatttgctgatgtttctgatttctaaaaggtttgacatcattccactcctatcattgctgtcaagactttttttgagaattgaaccggattattgcaaaaatgttgttattttcatatctagttgaggaattcataatggatcaggagccggcaaatacaacagggattttaaagtcataagcataatgtggatgtgtaatcgattgattacatttatataatggatattcatgatgaaaattgctggaggtgattactttccgatgaggttttaaccggaatgcatctcgtattataaagcaggtgttaatccttttcaatatataaaaggggatttctttacaatcgcaaagagtatgtatttctcatttccgcattaaaaaacccctctggctaataaccaaaggggttaaatatattattccacagtcacactcttcgcaaggttgcgcggtttatcaacgtcacagccgcggtgcagtgcagcgtagtaagcgatcagctgcaatggcacaacagataccagcggagcaagcgcagggttgacttccggcaggatgaatctgtcgtctgcgtcttctaagcctttcagcgagatgatgcaagtgttggcgccgcgggctgcgacttccttcacgtttccgcggatgctcaggttgacgtgttcttgtgtcgccagtgcaaagaccggtgttccttcttcaatcagagcgattgttccatgcttcagctcgccgccggcgaagccttccgcctggatgtaagaaatctctttcagcttcagggcgccttcgacacatacgaagtagtcgaggctgcggccgatgaagaaagcgtttcttgaaacagtcaggtactcacgtgcgatcatttccatttcgtccttctggtcgcagagggcttccatggcgtttgccgcaatacctaattctttgaccaaatcaaaaccgatatcaacgccgttgcgttctgctgcaacggacgcaacgatcgcgaggacggcaatctgagccgtatacgcttttgttgatgcaacagcgatctcagggcctgcgtgcagaagcaatgtgtaatccgcttcacgggaaagcgttgatcccggaacgtttgtaatcgtcagcgctttgtgacccagcgctttgacttgaacaagcacagcgcggctgtccgctgtttctccgctttgagaaaggaagataaagagcggcttcttagacagaagcggcatgttgtaagagaattcactcgctacatgcacttcaaccggtacgtttgcccacatttcaatatattgtttcccgacaagaccggcatggtagctcgttccgcaagccacgatataaatgcggtccgcttccgccacggcgtcagcgacatcgccggccacggccagtctgccgttttcgtcctgatacgtttggatgattttgcgcataacaagcggctgctcatccgtttcttttaacatgtagtgagggtatgtgcctttttcgatatcactggcgtcaagctcagcgatataagacgcacgtgtcatgacttcaccgtcaaggtttttaatcacggcttcgtcttttgtcacgatcaccatttctttgtccaaaagctcaacgtattcattcgttacttgaagcatagccatcgcgtcagatgccacgacgttaaacgtatctccaaggccgattaacagagggcttttgttttttgcaacgtaaatggtgtctgtgttttcaccgtcaaataatgcaattgcgtaagaaccttttaacagagtcagtgttttgcggaacgcttcttctgtgctaagtcctcccgccacaaattgctcgatcatttgaacgactacttcagtgtccgtgtcgcttttcagttcaacgttttcaagatattcgcgcttcagctgaacatagttctcgatcacaccgttgtgaacaagtgtaaagcggccgagtgcgctttgatgcgggtgagcgttcaggaagcttggttcgccgtgggtcgcccagcgtgtatggccgattcccgcttgagattcaaccgtgtgatccaccacttcacgaaggtcggcgatgcggcctttttctttgtacacatgcacgccctgctcattcgccacagcgataccggcagagtcataaccgcgatactcaagcttctctaatccttttaacaaaatctctttcgcatcaagctgaccgatataacctacaattccacacatattttcttcctcctaaaggtgcaaaaggagacgaagaaagtcaaattacaaggggactttcaatcgtcccctcccacatgtttttttggaagatcatgtgatttctctttgttcggagagtcgcccctccggtttgaagaaatccttacggctgtgatctaaatgaatcagccgggaggcatccgccgaaaattcgataacctccatcctcgtcaactaagccgtttttcgggcgcttagttcgggcgctgtaattataaaagatgcaaacaatcccgcctttcctgcaagtgaaaaacaaaggctgaacaagcttgattttacagcatgtgccaaggacggtcaattattttttgccgccccggcatcatgtttactatcatattatgctgatcgcacttgtcttgttcgctctctgcttataaacttcgctactccgctcccatttctgtccgcacgacatccacgatttttgtgacatattcgtcacaaagctcttttgttctcgcttcggccatcacgcggacgagcggttcggtgcctgacgggcgcactaaaatccggccgtctccgttcatttctttttccacttcagaaataacggccttcaccttagcgttttcttctaccttatatttatccgtcactttcacattcactaagagctgcgggaattttttcatttcatccgcaagttctgaaagggttttgccggacgccttcagcgtattcacaagcatgatcgcggacaagagaccgtcgccggtagtgttgtaatcaaggaaaataaggtgccctgactgctcgccgccgacattatagccgtcttttttcatcgcttctacgacatagcggtcgccgactgccgtttgaacgcttttgatttcttctttttcaagcgctttgtagaaaccaaggttgctcatcacggtcgatacgacagtatcatccttcagacggccttctgatttcaaatacttcgcgcatatgtacataatctgatcaccgtcgacgatgtttcctttttcatcaacggcaatgaggcggtcgccgtcgccgtcaaacgcaaggccgatatcggcgtttttttctttgacgaaagcactcagcgcttccgggtgtgtagaaccgacgccatcattaatgtttaatccgttcggagacgtccccattgtagacacgtcagcatcgagatcggcaaaaaggtgcgtcgcaatggaagatgtcgcaccatgggcgcagtcaagcgctacatgaatgcctgtgaaatcttcgtccgccgtctgctttaaaaattgcagatacttttgaacgccttcaaaataatcgtttacaagcccgaggtccgcgcctgtcggtctcggcagcttatcttccggttcatccatgagacgttcaatctcggcctcctgctcatcagaaagcttaaagccgtcccctccgaaaaatttaattccgttatcctgtacggggttgtgagaagcggagatcatgacgcccgcctcagcatccatggctttcgttaaataggatacccccggcgtagaaataacgccgaggcgcatcacctcagctccgatcgataaaagtccggcgacaagggctccctccagcatatgtccggagatacgtgtatcacggccgatcagcactttcgggcgctgcttatctttggtcaggacataaccgccaaaacgcccaactttaaaggccagctctggcgtaagctcgctgttggcaacacctcttacaccatctgttccaaaatacttgcccattttgtatcgctcctttttcattctgttgaagaagaatcagcgcttgatccgtcttcatcctgatcttgattttgatcctggttttgacttttattctgatcgctgtcagtgtcgtcttcccggttcttgttcttgtctttgtctgcgtctccgcttgtgccgttcttattgccggaatcagcggaaccgccgttatttttatttgaacttgtgtttttcttagaagtcagcttgatcttaaccgtgtcttttgacagggaccatgtgacgttttgcgggccgtttacttcaagctttacagagtgctctccgtcatccaggtccgagacattggcatacagttcaatgtccgactttttcagcgccttaatgttggcgggagagcctttggccgtaatatttatcgcctgcgattcaggatcgagaaactcaatctgctgtgagcctcccagtccgaccgtcttgattccgacattgtcaaaatcctttttgtcttcactgtccactttaacatgaagcgtgattttttccggtgataccttagtgacacccttaggaagcgggatatcggcattgatatcggtatctttgtcaattttgcctaaatcaagagatacgccgtcaataaattcaagtgaatccagcacatcctgcgggccgtaaaccgtcacctcactcggattcgagtcaatgctcgcaacgctcaccccgtccggaagacttcccttcctttcgattttgaaaggaagctttttgctcggactggctacgggaaccgtcactttaatgactgacggttcaacatcaacaggaagtgcgttgccgtctttgtcatagacggtcactttcacttccttttcaatggtctcatttgcattttcaaggttcacggatgctttgacaagtgaaatgttatcaatcacatttttcgaacctgtaatctgcacgtttttcgggctgataatcggctgctgaggggtgtatccctttttcattttgcttttattgtagtattcaacttccacgggaaaactctcagccgttttttcctgaatcgtaaccgtcgtgactgacgggttaatggagatcgtcagtccgtccgatacgtttttcgccttcaattcgaccttatgagtcccggtcttcagcttattcatatcggcgtatatctcaaaattcttcgtctgtctcgcctttttcaccgcgcttgtcgagcctttaatcgtgacatttacggtctggggcacgccggtgacgacatagttcgcttcatcatagtatgcttttacaggaatatcagtaagcgtagcctcgtcagtcgttgatgtcggaaaaaaggattcccccggctttttcggagtcggcgcctggttgttgttaaccgcaacgtaaagcagcagcgcaaagagcaatgcaatgatctttacagcccagcggttgtttaagaatttatccatttttcttgcccctccagtaccagcggttagaagaagtatctctggcgttcttcttaaactcggcttcaagcatttctttcagtgcttcttccgtcaattctctgtgaaggtctccgtttttggccacactgatggcgcccgtctcttcagatacaataatggttaagctgtccgtcacttcactgatgccgacagccgctctgtgacgcgtccccagctcctttgaaataaacgggctttcagaaagcggcagataacaggcagccgccgcaatctcgttatttttcataatgaccgctccatcgtgcagcggtgtattcgggatgaagatattaatcaaaagctccgagctgacctgcgcattaagcgggatgcccgtctcaatataatcgcccattcccgtatcgcgctcaatcgcgatgagtgcgccgatgcggcgtttcgccatgtagctgatcgattttgtaatcgcttcaattgtcttatgctgcgcttcctccacgggggttccgctcctggaaaagaaccggccccgtccgagctgttcaagcgcccgtctcagctcaggctggaatataatgatgatcgctaaaaatccccatgttatcgcttggtccatcagccactgaagcgtgctgagtcccaaatatgaactggccatccggaccaatacgatgacgacgattccttttaaaagctgaaccgccttcgtcccgcgtatgaccatgattaatttatatatcacataccaaacaaggagaatatcaacggcattgccgaggtattgcaaaaatgggatgtcctcaaaagccatttcctcgtcctccaagaattcagtcatttcgtttttctgttatgaattgtgctgcatgagcaatatgtacatcatatagcgtgctcattataccacattttgatttctcaagtgaaatgagccagagcggcgatgcacaaaaaaagagtaaagcgattatacgctttactcatcttcattcgggtccaaagcgctcacgacgccctggcccgccgatttcagttcgtaccagacccagtcaaacaattggttaatctcttcaatctgcccggtgacttgtccggctgaggccatgtatttttctccgttgacgacagtcacattgccgtcgacttttccttcaatgaacagcttgccgttttttactgtgacatcgccctttacggtctcgccttcagggacggtgaccgtgtgattctgcacgacaaggttcggctgtttggacacactgaaattgtggtcattatgccagctgttgaaaaaaccgccgcccattaaaatcacaaaaaccgctgcggctgcaatcatcggatgagttttgatccatcgttttacagaagcgcgttttttctcttttggaagattcgccataactttggcagtaaaatcagcaggggccgtgacatgcgatgtgcttcggacgagtgctacggatttctccatttcatgaaaatgccgtttgcaattcccgcatgactgcaaatgttgttttaatacgttttcatcttcaggaaggatatctccatcaagatgcttatgcataagctgcacaatctgttcaggacagctcatttcatcaccccacttaaagatccctcaattgttttctaagagcctctctgcctctgtgtatccttgtcttgacggtgccgacagggatattcagaatctccccgatttcaattaaagagagttcgtcaatatactttaatacaataaccgttctgtacttgtcaggcagctttaaaatctttttctgaattgtgtccgacagctccaatgacaatacggcgtcttcagggagaaccccgtccgcggcgatctgcgaatacatcgtcagcccttctgctcccgctacttctgcgtccagatagtaatcaggctttttcttgcggattcggtcaatggtcaggttggtcgcaattctgtaaagccacgttgagaactttctgttgatatcgaaactgtcgatattgacatatgctctgataaaagcttcctgcgcaatatcttccgcttcgtgaacattgccgagcatacggtagcaaagctggtaaatcttatctttataaaggtcaacgatttctgcaaacgcattttgatcgccttttttgacttgcttgattctttttttaatcaggttttccatgttttatcttacctctgcccttcaccggtctgtatctatacgttgattgttttaaaaggtttcatttttttattacatttattttaccaaatttcaggcagggtgtagatggaaaatacagaatatactgccttaacagcagcttaaaaatagtatatctgatgaacaatcagaaattgaaacaaaatgctgataaaaaaaagacacctttatgcaaaaggtgtctgagactgggctagctggattcgaaccaacgcatgacggagtcaaagtccgttgccttaccgcttggctatagcccaaaaatggtggaggggggcagattcgaactgccgaaccctgagggagcggatttacagtccgccgcgtttagccacttcgctacccctccgtattttttgaaaaacagtgccggccagaggacttgaacccccaacctactgattacaagtcagttgctctaccaattgagctaggccggcaaatatggtggaggatgacgggctcgaaccgccgaccctctgcttgtaaggcagatgctctcccagctgagctaatcctccatatgacccgtacgggattcgaacccgtgttaccgccgtgaaagggcggtgtcttaaccgcttgaccaacgggccgttgtgtccgcgtcgagctgacaaaagttattatatacaggttgtaccccatttgtaaagagaaaaattattttttttattttcaaacttttttacccgttttttaactgaaaaactcatccctcctctcttatttcatttatgatgaaagtatcaaaatattgaagggaatggacacagatgatcttagtcagctcttgtctcggcggtatcgaatgcaggtataacggctctcacgccgcttcggaaaaaatccgcagactcgtagaagaaaagaaagctgttatggtctgccccgaacttttgggcggcttcaccactccccgcgaaccggcggaaatcatcggaggtacgggcgaagacgtgctgaacggaacagcaagaatcgtaacggcatcaggcgaagacgttacggctttatatatggacggcgcggaaaaaacgttagcatacgcaaaagaaataggcgccgcaacggtcatccttaaagaaaacagtccgtcctgcggcagcagctttatctatgacggcactttctcaggaaaaaaaataatcggagacggcatcacttccgctcttttaaaacgggcaggctgccgtgttctatcagaagatgaattggatcaattataaaaaaggagagtagatatcatggatgtagccctgtccttttataaaccggagcatgcagacgggctgaacgggtttgtgctgagtgaagaagataaaaagttcacagctctgccgatagatgtcctgccgcaggctctcgtcatccgggatcgctacccgacagtcattttaaaagaagaccgccccgtcggttttttcattttacatacctcaaaagaaaccattgccccgtattcgaacaatgtgtctgccattttgctgagtgcgctgtccttacatgcgccgcatcagggaaaaggttatgccaaacaagcgatgctgcagctccccgcttttgtcgcaaattactttccttggtgtgatgaaatcgtgcttgctgtaaaccatcgcaatcatcgtgcaaagaacctgtaccggtcttccggttttattgataaaggtcgtcgcacgatcggccccatcggcgaacagcacattctgcatcattttttgtgaaagcgcttgattattcatctcatccctgccgatttttcttgaaacatctattcagaagcccatatacttcaagtattaacgacttgggagggtacaatcatgacagaccggcttaacattcacagattgaccacagaaaccagaaatccgcagaccgcttcaatccatcaagcagacacgatggaaattctccgcatcattaaccaagaggatttcaaagtggctgaagccgttcagcaggtgctgcccgatattcagattgccgttcaattcgcccatcagtccttacggcgaaacggcaggctgatttatgcgggagcgggcacaagcggcagactcggtgtactggatgcagttgaatgcccgcctacatacagcgtaagtcccgacaccgtcatcggtctgatggccggaggagcagacgcctttttgcaagcggctgaaggtatagaagacagcgaggaaaaaggcgctctcgatctcaaaacgatcgggcttaccgcagaagacaccgtgatcgccatcgcggcaagcgggcgcacgccgtatgcggccggtgcgctgaaatacgcaaaaacaatcggcgccaaaaccgtcgcgctcacttgcaataaggactcattgatcagcacttatgccgatcacagcattgaagtcgtcgtcggccccgaagtgattacagggtcaacacgaatgaaagcggcgacggcacataaaatgattctgaacatgatttccacggccgtgatgatcaaaagcggcaaagtgtacgaaaatttaatggtggacgttcatgtcagcaacgaaaaattgaaagaacgcgcaatcggcattatccaaagcatcacgggcgttccgtacgacaaggcaaaagaaacgcttgaggccgcaggcagccatgtcaaaacggcaatcgtcatgctgaagacgaattcggacgaaacacacgcgaaggcactgctcaaagaatcagacggcttcattgataaagccattgaacagcacctttcaaaagaaaaagaacgctgatcgttctttggtgaaaaataatgtgcttttacaagcccgcgccgttttcatgatcggcgcaggcgcttttaggacgcgtttcaggcacagctccccgggaaaaatcgtacggaaaaaggaggatctccatgagcaaagaggcattttatcagtcactggccaaagatatcctggacaattgcggcggttcatcgaatatttcaggctttacccactgtatgacacgcctgaggattacgcctttagatcaggacaaaacggatattgaagcgctgaaacagcttgacggggtaataggcgtcgtcgaagccgaaacactgcagatcattctcggcacgggtgtcgtcaatcatgtcgccgacgctttcgcaaaacttatgccatccggaaaaaacattgatttaaaagaagccgcctcacggaaaaaagccgatctcaacagaaaaaacaccacacccatcacactgtttctgagaaaaatatcaagcatcttcattccccttattcccgcactcattgcatcaggtttaatcaccggtattacgaaagccgtcattcaggccggctggctcccgaaagaatcccaaatcgcacttattttaacggttatcggttcaggcttattcgcatacctcggcgtccttgtcggcatcaatgcggcgaaggaattcggcgggacacccgcgatgggcggccttgcgggcatattgatccttaaccctgagatcgccaatatcagtttgttcggagagaatctgctccctggcaggggaggattaatcggcgttcttttcgctgcggtttttatcgcttataccgaacggtttatcagaaagtacgtccatcaatccatcgacattatcgtcacgcctacattgtctttacttatcaccgggctggtgacatatgtcgtttttatccctgcaggcggttttatttctgatctgattacatcaggtttattgtcgctgctgaatgtcgggggagtgctctcagggtttgtactgggagccgccttcctgccgcttgtcgtcaccggcctgcatcagggcttgactcccgtacatttggaattaatccggtcaatcggagatgacccgcttcttccgattctcgcgatgggaggcgcgggtcaagtaggggcagccttcgccatctttatgaaaacaaaaaaagcctcgttgaaaagagcgatcggcggaggacttccatccggtctgctcggaatcggagagccgctcatcttcggcgtcacgctcccgctcggccggccgtttttgacggcgtgtttaggggcgggaatcggcggcgcctttcaagcccattttcaggtggctactttttcaatcggtgtctccggccttccgctctcgtttctcgtacagccggctcaaatcgttttgtatatcatcggtctcttcatctcttacgcggcgggctttgtcttcacttatgcgttcggatttaaggatgatatggctgctgaatttgaataaaccgggagggatcagaatatgaaaacactgacagccgccatactcacaatggtcatcagcctctctttcctgccgcagcacaaagccgaagcccaatccaaattatacgacgcagcaaagctcagaaaggttgatcaaatgattgaaaaagacatcgcagcaggattccccggagccgtcctcgtcgtcgtaaaggacggacgggtgatcaaaaagaaagcatacggctacagcaaaaaatatgacgggaacatccttttatcccgtccgaaaaaaatgaaaacatcaaccatgtttgatctagcttccaatacaaaaatgtacgcggccaattttgcactgcagcgactcgtcagtcagggaaagcttgatgtgtatcaaaaagtctcggcttaccttcctgatttcaaagacagaaaaagcgatccgattcaagaaaaagaccgcattcgcgtcatcgatgtgctccagcatcaatccggtctgccggcaagcttttatttctatcagccggacaccgcaggccctttatattcacaagaacgggagaaaacgatccgttttctcacccaaatcccgcttgaatacaaaccgggaacaaaacacgtatacagcgatatcggttacatgcttctcggctgcatcattgaaagcataaccggaaaaacccttgatacctatgcggaacaagaactgtacaaaccgctgaaactgacgcacacactgttcaacccgctgcaaaaaggctttaaagaaaaagcattcgcagctactgaacgtttaggcaacacacgtgacggagtcatccatttccctcacatcaggacgtatacgctgcagggggaagttcacgatgaaaaagcattttactccatgggaggggtgtccggtcacgccgggctgttttccagagctgatgacatggccgtccttcttcaagtcatgctgaacggaggcagttataaacacgtttctctcttcaataaaagaacggccgatttgttcacaacggcggcatcctctgatccgactttcgctctcggctggcggaaaaacggcagcccggatatggagtggatgttcggcccttatgcaagcaggctggcatacggccacacgggatggaccggcaccatcacgattattgatcccgcttataagctggggatcgcacttttgaccaataaaaagcattcccccgtcgtcagtcccggtgaaaacccgaatgtttttgaaggggatcttttccccaccggaagctacggcagcgtcataaaaacgatttatgaagccattgaatgacaacccatgtcttttgtccaaactatgacggcaggagggcaccatcatgaaacttgtcatctcagctgtattactgttgttcattgttttcggaacgcatcatgcatcgacaaaaccggacattccgtcacaggcggaacaagcagtatcccgtatgacattagatgaaaaattagggcagatgctcatgcctgattttcgaaattggcaaaaaaaggggcagtcatctcctgaggctcttacccaaatgaatgacgaagtcgcagggcttattcaaaagtaccggttcggcggcgttatcttatttgcagaaaatgtaaaaaacactgagcaaacggtacgcctgacagatgcctttcaaaaggcgagccctgacattccgctattattaagcattgatcaggagggcggcatcgtaactagacttggtgagggcactcatttcccaggcaatatggcgctcggagccgcgagaaaaacagcctacgcgtcccagaccggcgccattatcggcaaagaactgaaagcactgggcattaatacgaatttcgctcccgttctcgatatcaataataatcccggaaaccctgtcatcggcgtcaggtcgttcagttcagaccgtgatctgacagcttcactcggccttgcctcaatgaaggctcagcaaaagcaggatgtcgctgccgccgtcaaacatttcccgggacacggtgacacggatgtcgacagccactacggccttccgcttgtcacccacaatcaagaaaggctgcgtcagattgaactttatccgttccggaaggccattcaggccggagctgatatgatcatgacagcccatgtgcaatttcccgcttttgacgatacaacctataaaagcaagctggacggttcagatatcctcgtacccgccacactctcgaaaaaagtgatgactcatcttctccgtgaagaaatgggatttaacggcgtcatcgttacggatgcattaaatatgaaagccattgccgatcatttcggccaggaagaggcggtcgtcatggcagtaaaagcaggagtcgatattgccctgatgccggcccaagtgacatcgctgcaaacggaaaaccgctttgcccgggttcattccgctttaaaaaaggcggtacaaaaaggggaaattccgctgcagcaaattaacaaatcagcggaacgcatcatttccctgaaaataaaacgagggatatatcccgcaccgaaagagacaaatctgaaaaagaagattgcaaaagcaaagaaaaccgtcggcagcaaaaatcacctgaaagctgaaaaacaaatcgcggaaagatccgtcaccgtcttacaaaacaaaaaccgcacgctcccattcaaaccgaaaaagaacagccgcgttctcattgccgctccttatgaagatcagacagcgtcaatggaacaaaccattcggcagctcatcaagaagaaaaaaatccggccggtaaccatcagtaaaatgaactttgccgagcgcacatttcatgatgaacacaaaaagcagatatctgacgctgattacgtgattacaggctcatatgtcgtaaaaaatgatcctgtcgtaaacgacggcgtcattgacgattccgtcacagatcccggcaagtggacgactgcatttccgcgggccgtcatgaaagccgcacaatcgaaccaaaaaccctttgtgctgatgagcctgcgtaatccatatgacgctgcgaactttgaagaagctaaagcccttatcgcagtctacggctttaaaggatatacagacggacaatttctccagccaaacattccggcaggcgttgaagcgatattcggacagacaaaaccgcaaggcaggctgcccgctgacattccttccgtcactcatccgggaacgacactctatccttatggtttcggtatcaatctgaagaccggaaaaccgctttaaacaggaggacagatcatgaaaacacaaacggctgcgcttcttgccggattagtcgtcatcagtgctatgacgggagtctcggcggcttctgacagaaaccttcataccaccaagaaaccaagcatccaaacaggcatcgaccgcctgctgaaagattataaacaggaactgaagggaaaaagggtcgggctgatcaccaacccgaccggtgtgaacaattcattgaaaagcagcgttgacgtgctgtatgaggcaccagacatccatttaacggcattattcggaccggagcacggtgtccgcggcgatgcccaggccggagacaaagtcacatcctatatagacgaaaaaacagggcttcccgtctacagcctgtacggggaaacgaggaaaccgacgcctgacatgctgaaagatacagatgtgctgattttcgatattcaggatgtcggaacacgatactacacctacatttatacaatggcctatgccatgaaagcggccaaagaaaaaggcattcctttttatgtcttggaccggccgaatccgcaaggcggacgaaatccggacggcccggttcttgaaccggattacgcttcatttgtcggactatatccgatcccgctgaagcacggcatgacgatcggtgagcttgctcttttattcaataaagagtttcatattggcgccgacctcaccgtcgtaaaaatgaagcgctggaagcggacgatgacaattgaagataccggtctgccgttcgtcctcccttcgcctaatatcccgaccccggacagcatattcgcatattcggcgacaggactaatcgaaggcacaaacgtatccgaaggaaggggcacgacaaagccgtttgaacttatcggcgcgccttatatgaaaagcaccgagctcgaagaacgcctgaacagtctcaagcttccgggcgtcgccttcagagccgcatcatttatccccagcttctccaagcaccagggcaagctgtgccacggcgttcaagtctacgtaacaaacagaaacacatttgaagcggcaaaaacagggctttccattctgaaaaccatgcatgacttatatccaaatgacttttccttcttgccgacaggctcttttgacaagctgatcggtaacggctgggtacgcaaaaaaatagaaaaaggcgcttccattgaagacatcaccggcacatatcaacgccggctggaccaattcaaaactctaagaaaacaatacctcatatactgacaacattcgtgttacacgtgtaacattttgacgcatttcacatttccgctttttataggaaaacattcatttatttggtacaatttaaatgataacagttatcatttaaatgaatgtttcctaaaaggtggtttctcatgaaaaacacattattctttcagccaattgatatcatctccgtaaaaaaaacagccgaccttctgtcagagcatcagctcactgattctcccgtattgatctttcatgtgaaaggcgagggacaaattgatatcggaacagacagctttccgctgcagaaggaaacgctctacatctgtccttgtgatgagacattcaatattgcccctatatcgtcaggcggcatccatttgtatatcgtcagactccgtgttttctcctattcatcagatgatgaagcgatgcttccggataatggggaagacatcttccacggacttcagcaaatgaatttacaaacggtggatcatttgacaagccggcttcagtcactttctgaaaacgtgcgatcggcggatgcattgcagaaaatgaaatacacagccgactttcagcagctgatgtacgacctttatgccgcaaaagtatgccatcaaaataatacgaaagcggcgatcgaacagacaaaacaattcatacatgctcagtccgacacaaaaatcacgctcacccagctcgctcatatggcgggaatcagtcccaagcattacagtgaaacctttaaaaaactatacgggcagagcgtaaccgaatatatcacagacatccgcataaccaatgcgaaaaaactgatggccaaggcaaactgcaaactgcgggaaatcgctcatcaaatcggctaccaggacgaattttatttcagccgcatctttaaaaaacataccggcagctcacctacaagctatatgaaaaaaaggcgcacaaaaatggccgcttacggaaaagaaacgatggggcatctgattcctctgcatcacgtgccttacgccgcggcgctgcacccgaaatggacggcctattattacaaacaattctcttctgatattccggttcacctgagtgcttaccgctataatgcaaattgggaagagaacttgcacacgctttcccaagctgccccggacatcattttcagtcttgattctgtcagtgaagaagaaaaacagcgcctgaatgacatcactgaagttttttaccttcccgctcaagagaattggagagaccagtttcttcgcacagccgcatatttgaatgaagagcaggaagcgcggcactggcttaaagcttatcaaagtctcgcccattcagcgaaagatgctcttaaacacgtgcggcatcagcggttcttatttatccgtgtatataaagaaaatatgtacatcgcccataacaacagtattgaggatgtcttcttcggtgatttaggctttgcctccgcaaaaccggaatcttttgctcctgacgaaaagatttccttggaaatgctggcggattgccaggctgactgcatcatgcttttcacttgtaaagaaccggaaacacttcgttattttcagcggattcagcagaccggaatatggcagaaccttagagccgtcagcaataaacgcgtgtttcccatatcatctgacccgtggattgaatattctccaagcggacatcagcggatgatcgagcaaagcatttccattttatccgaagatcgtccatggtaataccggaaattatccatggtcttatccctgttccttctctataattccaattgataatagttatcaattgaacaggaggaacaatagatgaagaaattggcattcgctttcatgattttgcttttggctttcacggccgcggcttgcggaagctcagaaacatctgatacagcaagtaaaggaaaggacgcttcttcagataaaaagaaaatcgaatatctcggaaaaacatatgaagtcaaagcgccgactgacaaaatcgccattacaggcagcgtagagtcaatggaagacgccaaattgcttgacgttcatccggcaggagcaatttctttctccggcaaattcccggaactgtttaaagatattacagataaatccgtatcaacgggagaaaaaatgcagccgaatatggaaaaaattcttgagctgcagccggacgtcattctggcatcaaccaaattcccggaaaaaacgttaaaaaaattgagcggcaccgctgaaacgatccctgtctctcatatctcatcaaactggaaagaaaacatgatgctgctcgcccagcttacagataaagagaaaaaagcgaaaaaaatcatcgcagattacgaacaggatctgaaaaagacaaaaacaaagatcaacagcaaagcgaaacagtcaaacgcgctggtcatcagaatcagacaaggcaatatttatatttatcctgaacaagtatatttcaactccacgctttacggtgatttaggcctgaaggcgccggacgaagttaaagcggcgaaagcgcaggaactgatttctcttgaaaaattaagcgaaatgaaccctgaccacatctttgtacaattctctgatgacgaaaacgcagataagccggacgctttgaaagacttagagaaaaatccgatttggaagagcctgacggcagtcaaaaaagaccatgtatacgtcaatacgatcgatccattagcccaaggcggaaccgcttggagtaaaatccgcttcttacaggttgcggctgacaaattgactcaagactaataaagagtaggtttttcacatgtatgcaaaacggcggacacacattattatcattgcttcaccgattgccattgttctgtcactgctgctttccgttttatacggcgcaaagcagcttgacttccataccgtgttctccgcattgctgcactttaatccggagaataccgaccatcagatcatatggcattcaagaatcccgagggctgccggcgctatgttcatcggcgccgcccttgctgtttccggagcgctcatgcagggaatcacacggaactatctggcctcgccttcgatcatgggtgtgtcggacggctccgcttttatcatcaccctttgcatggtattgctccctcaatcgacatccattgaaatgatcatatactcgtttatcggttccgcattcggcgccgctcttgttttcgggctggcctccattcttcccggcggttttaccccggtgcagcttgccattatcggaacggtgaccagtatgcttctcagcagtctgtcggctgcgctttcgatttattttcaaatttcgcaggatctcagtttttggtacagtgcgagactgcatcaaatgaaccctgattttttgaaactggccgtcccgttttttgcgatcggaatcatcacggccatgattctcagcaaaaaggtcactgccgtatcattaggagacgacatttcaaaaagtctgggacagcagaaaagaaccatcaaactcatggcgatggcggccgttgtcatattgaccggaagctcggtggcactcgccggaaaaattgcctttgtcggtttggtcgttccgcacatcacacgttttctcgtcggatcggactacagcaggctgatcccatgcgcctgcatcatcggcggcgtcttcctgaccctttgcgatcttgccagccgattcatcaattatccgtttgagacgcctattgaagttgtcacttctatcatcggtgttcctttctttctttatttgattaaaagaaaaggaggggatcagcgtggtgcgtaaaatggccggaatttatatcattctgattgctctcatattgctcgtaagctatttcagcatgacaagcggttctttttccgcaaagccgggtgaactgctcagtacgcttttccgcatccatccgaatccgcaatatgacattttgctgtttcagctgaggctgccgcgcattgtcatggctgctgccatcggactcgggttggggatagccggagccgttattcaggccattaccaaaaacggtcttgccgatcccggtattttgggcattaatgcaggagccggagccggaatcgtcacgtttatgcttctgtttcagggacaatctgaagcgacggcacttgcctctgcgatgggtatgcctgtcttcggcctcatcggaggattgatggcggccgtgctgatctatattttcgcctggcaccgggggcatctggaatcgggcagaattattctcgtcgggatcgccatgaactccggattcagcgcgctgtctttatttctttcattaaaaatggacccgcaggattatgagatggcgatggtttggaaaaacggcagcatctggtcggcaaactggatgaccattacggcgatccttccgtggctgatcttgttcattcctcttcttatggcgaaaacgtcattgctggataccattcgtttcgatgaggacacagtgaaaagcctcggtgtttcaaccaataaagaaaaaacgattttactcattgcctgcatcgctttgatcagcgcatgtgtaaccgcagcgggcagcatggcatttgtcggactgatcgcgccccatatttcccgcaggctcgccgggattgagcacagatactcattaccggtcagcggattggtcggtatgctcctcgtcatatccgccgactttgcgggcaaattgttctttcagccttcagaagtgccggcgggaattattcttgcgattctcggcgttccttatttcttttttcttctgtttaagcagaagaaggggctggatgcatgagaggcacccttacagaacaccggataaacggaaaggaatgcactgtgtatcttcctccctcctattcggttcaaacaggggctttaccctgtgtgtacgtactggacgggggttctttgtttttagaacagatggataagcttgaatcccaatttgcgaacggaacacttcccgaattgattttcatcggcatcaaaccggctgacaggctcgatgagtacacgccgtggcccgcgccttccctgagccctgcgtttcatgatttcggcggcaaagggaggctctttctcgaggagctgacaaatgtcatcattcccactgttgaagatatgcatcacatttctgcacatccggaaacgagaggcctgatcggcgcgtcattaggcggactgttttcggtgtacgcgatgttacagaagcctgaaatattcggcagaatcggctgtatttccggttccttctggtatgaaaaatcagcagagtatgtccgctccgcatctttgcgtcctgcacggcggcgtatctatatgtctgtcggcagccgcgaagctgagcataaaaacaacatccaaaacaccatgatccgacaaaataaagacgtgcatgaaagcctgaggcaaaaaggcttttctcaatctcagctctctttcactgttgaagaaggcaccgtgcaccatcaagaagcattcaaacgacaattcaatgcagcactaagctggctgtacggaaaaaaccgctcacgtagctgagcggtttttttcatacttcatcacgaccggcttaagttcaaagcgtctcagcaaatagccgaacaaagcggcaaggatttgctgaaaaagcatcccgatgacgaccggaaccgccacttgagacggaaagaaagacacggcgagaacggctccggcgctgatattgcgcataccccctgtataaatcagagacacgatttcatcctggctccgcttcatcagtcttccgatcagccaagccacggcataacccgtcatggcaataaaaaataccatgcctgcgatgcccgcaaatttgatatccacgtgcgtgacatacggcgcgatttccgaactgttaatggcaatgacaatcatcagacagatttttgaaaaaggagacagcgaccggcttatcgcctgagtccttaccggcggggaaaactggttgactatcatccctgcgatggatggaatcaccaccatctccgccagccctttcatcattccccacacatccatctgaacattcgccccggccaggacagacaggctcaacggtacgataaaaggagaaaggacggtatcaaccaggataatagacagcgtcaatccgacattccccttatacatcgcagcccaaatcaaactcgtaattccggtcggaatcaccacacccataatcagacccgtcacagttaaagggtcaccgctgaaaatcagatggccgcttccccatgcaaaaacaggcatgaaaatatgcagaacaaacaatgccatgatcatcgggagcggcttctcgatactgcgcttcagcgattgaaaattggcactcagactgcccgtaaatgtaataaatgcaaatatccacggcacagcgccggccatccagctgatatgctgagataacagcacacccgccgccacacttgacggagtcaaaagcggcatgattctccccaacacttggttcaacttctgaagccacatcatatgcaagtctcctatatcacggttttcaaatctcattcattataacaatgcaccccggcaaatttaaccgaaaaaaagcccggatatattcatccggacttcacaaattctatgccatttgtttcattaaatcccggcttttctgatttaatccctttaattcagcctcaattccgtattctttacattttgcgacaattttctcaagagccgccgctcccgaatcatcccacacatgggcatcggtcaaatcaatgacaatccgctccacgtcttcatcataaacgatggcattcatgagctcagacacggaagcaaaaaagatctgtcccgttaccttataagttctgacatctttctgttcggaatgtgacacaatcttcagcttagaaattttcgccgtaaaaaagatcgcgcttagcagcacacccgcgaagacaccctttgataaatcatttgtcaggacgaccgtcacgacggtaataaccataacgatcgaatcagtaaggggcgctttccgcaaacctttaatcgatgaccagtcgaacgtgccgatggacaccataaccatcacggccaccagcgcagccatcggaattttcacgacgataccgcttaatacggcaattaaaaacattaaaaacgcgccggccgtaaaagccgataaccggccgcgtccgccggctttcgtattaatgacagactggccgatcattgcgcatccggccatgcctccgaaaaatccgttcacaatattggcgatgccttgtccgcggctttctttgttcttatcactatccgtatccgtcatttcatcaatgatctgggccgtcagcagcgactcaagcaatccgacgaatgcaagggccagagaatatgggaaaataatccgcaatgtctcaaacgtccacggaacatccggtatcaagaaatgcggtagtgaacttgtaatcccgcccatatcaccgaccgtgcggacatccgcatggaaggctaccgcaatgatcgtcatgacaataatcgccaccagcggagacggcacagccgtcgtaaccttcggcaatagatatatgatagccagtgatccggcaagcatggcgtacatgacccatgaagctcctttgaactgcggcagctgcgcagaaaaaatcaagatcgccaaagcattcacaaatccgatcatgaccgaacgcggaataaatttcatcaatttcgcgatcttactgacaccaagaataaattgaataatacctgtcagaatggttgccgcaaacaaatactgcagcccgtaatcagccaccaatgtcaccatgacaaccgccattgaacccgtagcggctgaaatcattcccggtctgccgccgaagatagaaataataatcgcaatacaaaatgatgcataaaggccgaccatcggatcgacacctgcaataattgaaaatccgatcgcctcagggatcagagcgagagcaaccagaataccggccagaatgtctttacggacattcccgaaccattgctgctgtaacgtataatctttcaaatgataacgactccttttcactataaaaatccgcaccctatcagttggaaacattgattttcatctgtggaatatgaggcaagcttacggggaaaaagaggacacgctcagagtataatgtcgttgaggaaaggaattgttaacaaagagtatcatattaaactttaaagaaatgtgcaagaccgtataaataagaaaagaaaacgactctcactggagccgtttccgcttttataaaagttccggatcagacacaagaatcgtttttattgcgctgatatcctttctttcttttgtcaccgggtcgatgcccatgagatgatcaatggcttcttcataattcttcagttccgtcttttccgtaataagatcatagagctgcggaaggtcggacgcgcatgctaacgcggcttccatgatctggcgggcttcacctgtgcccacaatcgtcacgccgtttgacagcagctggtatggcctgaccgtcatctcatacgtatcatcaaagcccatcggcacgattctgcctcccttttcaatgaaaggataagcccaatcaagctggttgccgatggcgtcaaaaatcacatcaaattttcttccttgattaatccgtttcacttcatccacggttaatgcttcagggtggtagacataatccgatatccggctcgccgcctcgcttcggaaactgcctatttcagtcgctaccgtcaatcgcgccagttttttcaccatcatttgcacaagcagcccgatcggtccggaccccaaaaccaagaccgagtcctgaggctgaatcgaagccttgtccacaacattcagtacacaggagagaggctcaaccaatgtggcccgctcccattccattgaatccggaattctgtacatgaacctgtcttcccccacgtaatattccgcaaacgttccgtgcgctccgattccgagctgccaatcctcgaaggtttcgcaataacacgtcagccctctccggcaataatgacatttcccgcaaaactgcgtaggatctatcacgacccggtctccgacttttacatttgttacgtccggtccgatttccacgaccgctcccaccgattcatgccccataatcatatgatgggttgcattcatttttcctttcagcacatttaagtccgttccgcagataccagtgccgaaaattttcactttcacatcattggatttccgaatttgaggctcgtccacctcttgatattcaagcttatcattaggagtccagaccaacgccttcatatttctcttcctttctgccccagcggatttggtctaacaatgtttgatgaagctctttcgttgatgccgcaatacatgattgctgattctgataacttaaatctgtcagaagtgtttcgtccaaagaccggccgtatgcatccgtaatgaccactcccgccttcttcgccaaaaagacgcttgcggcaatatcataaggaaacaaatgcagcacctgcccgttcccgacctgctgaaaatctgaaagcagcttcggatcatctttcagcagacgattgccgatatccacataagcatccatctgccccgtgataattcgcgaaatcgaataagaagcgctgttgaaaacaaaaaccccgccattattggccgactggtcaatcagatggccgtatgcgtccgtcatcagctgcgccggatgcccgttaaattcaaggctccaaaacatatttttaatatcccgcactccgctcaaattcggcaattctccatgatacccttcaaaatgaatggcatcgctgtatatatcaccgtacataaaagcgcctgatttcaattcaagtaaaaaagcaaattcgatatccttaatctttgcgtttggcttatacgaagcaagcgcaatcgaaatacacgacatttcaagtcccgcggcggccgggcgcgttccgtctatcggatctacaattaaaatatattgcggatcttctccaatcagcttcaggccgccatcctccgtgtaaaaagcaaccggatgacccttttcttgaatataatccagcaccgcctcctcagcagcggcatctatgttaaattgggcgtcgccgcccggggaatagccgtttacgagcctgtttttcagcgtgcctttttgatttttcaccttttgataaacaaattgtccaagcccaatgatatagtctctcacttgatttcctccaatagcttacgaagtctgtagcagagcacttcggcttcactaagtgttatggttaaaggcggacggatcttaaatacatttccgaatccgtaacgggatgtccggagaatcagcccgtaatccattgcccgtttagcaatataattggtcagctccacatccggttcattgttctctttaacaatctccacaccgatcataagaccgacgcctcttacctcagaaataaaagcgaaatcctctttcatcgtttctaagcgatccataatataatgaccgaccgtcgttacattttccaaaaatcccgggcgctgcataatatctatggttttacacgcggcagcggcggccatcacatttgagccgtacgtgaaggagtgcgtataccccggaagcccggtatacttgtcctccgtcagagtggcggcgacttggaagcctgtgcccccgagcccttttgctaccgtcatcatattaggtttcacatcgaagtggtccgcggcaaacattttgcccgtccgtccgaatccggtctgaatttcatcaaaaatcagagcgatatcatgttcatcacaaagctttctcagctgtttaaaatactctttaggcggaacgacgtttccaccgtttccggatatcggttcaataatcatggcggcaatttttccattgctcgcatactcaataaaatcattaattctttctacgcacagcataccgcatgaatcaggtttctgattataaaaacagcggctgcaatagggatcggggacttgcaggccaaaagaaatttgcggcgggaaaggttcttttctgaatgagttgccggacaaagcggaagtcatatacgtttgtccgaggtggcttcgaaataaggagatgacatcggtttttccggagtaatactgagccattttaatagctccttcatttgcaccggaaccgctgctgactttagggtgtacttttgtgagattatcgggggcgatttctgctagtttttctgccagtttatttacggcgtctgtttgaaaagatgatgttacatggatcagcttatcggcttgttctttaaccgtatcaatgacctctttgttaccgtatcctaaattcaagttaaacgtggcagaggcgcaatcaatgtactcatttccctcttgatcgtacaggtaaatcccttctccgcgctccattactacatcgtcaacactgtaatacaagctgtctggattcgtgatttccttcgttcccacaaataccacccctatgaaattattagaatttcgctttttatcgtataaattattgaaaataatgtcaacgatctttcttgtaaaaaatgttaacaatttgttaacgttaccataagggatgtacgagaaaaagttatgtgatatagtaacaataattggattttttgtaaaaacgtcatgtcatacgagtagagagaaatatgattttactaataaggagataaaatgatgaaaactcgtctgctgtggataagctgtttttcttatggatcgattgcttttacacttgttattctgggagccgtactgcctgagttactcacacattattcacaaagctacagtaatggcggagtattggtattctctcagttcatgggctttctcattggtgtcatcggaatgccttacatggtgaaaaagcttgggcgcaaaaacgtcgttatctttggcctggcactcatcagctgtgaaatgttcatcaccttcctgccgccctggccgctgctatttcttctcgtcagcatcgcggggcttggcgccggattggtggaatcctgtgtaggcacgatcatcctcaccgctattaaagaaagacaagctgttgccatgagcaagatggaagtggcctacggattaggtgcgcttttcatgcccctgctctcaggctttcttatcaacaaccacatgtggacaattgcttttttagtattagggttatccagttttgcactattaattgcatggaagcagatgagtttcggcagtattgatcagcttctcatccgcaaagaggtcccttccgatgacactcaaaaagaaagcaccggttatcggtcacacggattgctgtttattgccttggcgggtgcttacttcttcttttacggcggcagtgaagtttccattgtacattttatcccctccatcttcgctgagaaatgggatatccccaactctttggcaacgataacagttacagtgtattggacggggatgatcatcggaaggttattaacaggcccggtatcagaaaagctgacatatcaccgttatcttcgtctcataagcattggcggtctggctgcacttaccgtattagcattaagcaaaaacgtatggttcggttttgccctttgcttctttttaggactgttcatggcaggcatgtttgcaatagccctaatcatcacgaatcatttttatcccggaaagacagaaacgactaccagtattctgctcgcttcaaacggattaggaggttcactccttccgatagccgtcggctggagcttagatgaatatcccgcacaaactgcgttctggctgtttactgcactaatgctccttatgctgctgattgtgttcagtttaagaatgctcgagacaataaaatcaaacaatcttcaacatcacaacagcaaagcaaaatcaatgtaaacaaaaaagctaatgcctttgaaaggcattagctgctatatatatctatgtgatctttcatataaaaaacccagttcatgatgaactgggttaagatagcttggcggcgtcctactctcacagggggaaacccccgactaccatcggcgctgaagagcttaacttccgtgttcgg

SEQ ID NO: 34 - DNA, 145146 bp, Bacillus velezensis
  source 1..145146: mol_type = genomic DNA
gctccagttggtcctgttacaccagttattcccgttacaccagttggaccagttgctccggttgaacctgttactccggttgcgccggtttctcctgttgctcccgttactcctgttgctcccgttactcctgtggctcctggttctcccgttgctccagttggtcctgttacaccagttattcccgttacaccagttggaccagttgctccggttgaacctgttactcctgttgcgccggtttctcctgttgctcctgttggacccgtgattccggttgggccagtttctccagtcgccccagttactccggttggtcccgtttctccggtcgcccctgttactccatttgctccagttatacccgttgctccagtcactccggttgctcccatggctccggttgccccggttactcctgttgaacccgtgattcctgttggccctgttgctccagtcggccctgttgctccagtcgagccggttgttcccgttactcctgctaggccggtttctccagtagctccggtttctccggttgcgccagtaactccagttggaccggttgggcctgttggcccggttggacctgttattccggttgagccggttacaccagtcgccccagttgggccggttgatcctgtaattccggtagggcctgttactccagttgaaccggtttctcctgttacacccgttggacctgttcccccggttgcgcctgtttctccagttgggccggttggaccggttgcaccagtcgagccggttgggcctgttactccagtcattccggttgttcccgtggttccggttgctcccatggctccggttgccccggtttctcctgttggacccgtttctcccgttgaacctgttgcgccggttaggccagtttctccagttgcaccggttacaccagtcgaaccggttgagcctgttactccagtcgctcctgttatccccattgacccagtcactcccgttacaccggttgtgccggttggaccggttgctcctgttgagccagtttctccggttgaacctgtcactcccgttgaaccagttgaccctatttctccggttggacccgttgccccagttgggccggttgctccgattgaacctgttgctccggttggaccggtctctcccgttgggccgatttctccagttacaccggttgcgccggtttctcccgttgaaccagttgagccggttgctccggttattcctgttgaccctgttacaccggtccctccggtttctcccgttacacccgttgaaccggttgggccggttgggccggttgagccagtcgccccagttactcctgttgctccagttatacccgttgctccagtcacacccgttggaccagtcacacccgttggaccagttgcgcctgttgatccggttgagcccgttattccggtcgctcccgttggtccgatttctccagttacaccggttgcgccggtttctcccattgagccagttgagccggttgggccgttttctcccgttgcaccagttactccggttgctccagtttctcctgttgggccagtttctccagttacaccggttacaccagtcgagccggttgttcctgttactccagtcattccggttggaccggcttctccagtagctccggtatccccggtcgagccagtttctccggttgctccagttactcccgttgcccctgttactccggttgagccagtcgcgccagtttctccagttgaacctgtcactcctgttgatccggttggacccgttgcccctgttattccggttgagcctgttgatccggttggaccgttctctcccgttgggccgatttctccagttacacccgttgcccctgttgggccggtttctcccgttgggccgatttctccagttacacccgttgcccctgttgggccggtttctcccgttaccccagttactccggtcgctccagttactcccgtcgccccggttacaccagtcgagccggttgttcctgtcgagccagtttctccggttgctccagtcggtcctgttgctccagttactcccgttgcaccggttactcctgttgagcccgtggttccggtttctccggttggccctgttacaccggtttctccggttgaacccgttgttccgattgggccggtttctcctgttatccccgttgctccaattgggccggtttctcctgttatccccgttgctccagttgggccggtttctcctgttatccccgttgctccagtcgggccggtttctcctgttatccccgttgctccagttgggccggttgttcccgttcccccggttacaccagtcgctccggttgggccggttgaccctgttgctcctgttactccagttgagcccgttgcgccagtcgatccggttactcccgtcgctccagtcgatccggttactcccgtcgctccagtttctcctgttgaaccagttacaccagttgcaccggtttctccggttgagccagtaatccctgttgctcctgttgctcctgttgttccggttgaaccagttgagccggtttctccggttgcacctgttgctccagtcactccagttgcaccggtttcacctgttgagccagtaatccctgttgcaccgctttctcctgttgaaccagttacaccagttgagcccgttgctcctgttgttcccgttacaccagttggaccagtttctccggttgggccagtttctccagttattcccgttgctccggatgcacccgtcgctccagtttctcctgtcgatccggtttctccggttgaccctgttgctcctgttactccagttgagccagtcgctccagttactcccgttggaccagttacacccgtcgatcctgtatccccggttggcccggtttctccggttataccagttggccctgctgctcctgttgggccagttactcccgttgaaccagttgatcccgttacaccagttggaccggttgatccggttgatccggttgcgcctgttgggccgattgcacccgttgcaccggttgatcctgttgatcctattgccccagttactcctgttgggccagtttctcccgttgccccagttactccagttgcaccggttgatcctgttaccccagttgggcctgttgttcctgttgctccagttattccagtggcgcccgttgcgccggatgcacctgtcgatccggtttctcctgttgatccagttactccggttgggcctgttgaacctgtcgatcccgttgctccggttgggcctgctgcgccagttgtgccagttgcgccggttgagccggtcgcaccaattgagccggtcaatccagttggaccagtcactccggctgggccagttgcgccggttgagccagttggcccgatttctccagttgaaccggtcgctcctgttactccggtgaaccccgttggtccagtcagccccgttgctccggttgaacctgttaccccggttgtccccgttacaccagtcgctcctgtatccccggtcggacctgttattccggttgacccggttgcccccgatgcacctgttactccggttggacctgccgctccggttgagcctgtttctcccgtcgccccggttacccctgttactcctgtcgatcccatgacccccgtcgggccagtcacaccagttgatccggttaaccccgtttctccggttgaacctgttaccccagttgtcccagttaccccagtcgctcctgtatccccggttggaccggttgctcctgttggacctgttactccggtcgctccggtgagcccggttactcccgttactcctgttgctcccgttatcccagttgctccggtttctccggtcgagccggttgcacccgttggaccagttacaccagtcgccccaattgggccagtcacaccagttgggcctgttgctccagttgagcccgttgagccagtcgctcctgtttctcctgtcgatcccgttggaccagtctccccagttgaaccggttgaccccgtttctcctgttgatccggttacaccagttgaccccgtgaccccagtcgggccagtcactcctgtttctcctgttgatcctgttgatcctgttgcccctgttactcctgttgggccagtttctccagttggcccagttacacccgtcgctcctgtctccccggtcggacctgttattccggtcgctcctgttgggccgatggggccagtagcccctgtggctcccgttatccccgttgccccagttactccagttgaccccgtttctcctgttgatcccgttgctcctgttactccggttgaacctgttaccccagtcactccagttgaaccggttgctcccgtcgatcccgttgcacccgttgagccggtggctcctgttactccagttgagcccgttgagccagtcgctccagttactcccgttgggccagttacaccagtcgctcctgtatccccggttggaccagttgctcctgttgctccagttactcccgttgaaccagttgatcccgttaaaccagttgatcccgttaaaccagttgatcccgttaaaccagttggaccggttgctccggtttctcctgttggtcctgttgcaccagtcgagccggttgttcccgttcccccggttacaccagttaccccagtcgatcctgtcgatcccgttgcacccgtttctcctgttggaccgttttctcccgttgggccggttgagccagttactcctgttgcgcctgttggtcctgttggtccggttatccctgttgcaccagttacaccggtcgctccgatttctcctgttgctccagttactccggtcgcaccagttgatcccgttgcacccgttgagccggttgctccggttgggccgatcgggccagtaacccctgtggctcccgttatccccgttgccccagtcactccagttgatccggttacaccagttggacccgtttctcccgttgagcccgttgctccggttgttcctgtaattccagttgggcccgttacaccagttggaccgatctctcccattggcccggtttctcctgttgaaccagttgaaccagttgaccctgttgctccggttgggcctgttctaccagctgagcctgttactcccgtcgacccggttactccagttggaccggtcgagccggttgggccggttgctccagttgaaccggtcgatcccgtgacccccgtcgggccagtcacaccagttgctccggttatgcccgtggcgcccgttgcgccggttgatccggtcgcaccaattgagcctgtcaatccagttggaccagtcactccgtcttggccagtaaccccggttgcccctgttactcccgtcgacccggttactccagttggaccagttactccagtcgggccggatgcacccgttgatcctgtgactcctgtcgctcctgttgtaccagttgagccggttgtacctgtggctccggttgaaccagttcctccggtcactcctcttggtccggttactcctgtggggcccgtcactcctgtgggacctgtaattcccgttacgccaggttcacccccggtttgcgccaatgaaacatcgtctattaaaatcgtgccggtagaaactttacttaatacaatgacggcagaggccgcgccagaaggcacactgcttgttttatagatttcagaccatgtgtggaagagcacgttcggcaaatttccgggtgtaatattttcttgaatggaactgatttgttcacctgccgcgctgacatagatgatctggagagttacttggggacttggctcatttccgagcgttgcgagtgatacgaatagagtcactgacttggctgaaattggaacgatttgactgaggtaagcatatggctgagctccaataaattgcgcagaatacctccctgaatgtgcaaacaaactgttaatctgggtatttgccgaactccaccccgctaatgtgccagtttcaaagcttccgtttataatcggattattcattcaatctttttccctctccttcccgttgttgaccgtctacctttttaagacagcatattaatacgggctgtgttttgacaacctaaataaaaaaggtgatttcttttcatcaccttaatccgatccttgaatggggaatcccgtcgcaatgagggagcggtttgccgctgcgacttgtgttacgtaattcgaagaaaggacggataaatagagctggtacgcggctgtttcatcagccttcatttcgtcgatgtacgtaaaaggaattcctatgatttgtccgcctgaagaaaagaggttccgctcttgtctctgtgtttgtatagatacgccatttctttgcagatcgacagctaagaccaatgagaaatgagacgcgagcggatctaattccacatttacttgtatgacggcatccgttttcacaaattgatctgtcggcgcggctatcactgcgcttaacacgtttatcggtgttccttctaacggaatcatcatctggtctgctgtattttgaaaagctaccgcaggaaccgctcccggcggaccctcaggccccgggggaccgggcggacccgcctccccttgcggaccgcgggagccggcgggtcctcttttgccttcgggacctcgcagcccgggtacgcacaaggcagatcgattttcatctgaagacgaaaaccgtttttccgtccctgtttccggtctttcaagttcacatggtaattgttcataccggcgtttcatatgtctgctcatatatttgtaaggtttctgtttcaatatcatgtattgattacggccgctgctcatattatcaccccggccatattctattcgcactggagtcatcatgtgcaggcccttccccttccttacagaaataaaaaaaaggcagacctgagtctgcctttttcttctaccataatcctaatactttccaccataatccgccgatcacaagccatgtcacaatatggacgattgacaggataaagccgatggaccaccatttgctttgcgatatatagcccgctccgaaaaagaccggagccgctcctgagccgtaatgcgtcgtcgaaccgaaaaggttgctgaaaaacgccaagctgagcgccgccaacagaggcggagcgcctgccgccacgatgacggcgagaaatgccgcatacatggcgctgatatgcgcggttgcgctcgcaaagaagtaatgcgtgtaataatacacgacaatcagaatcataaatgccacaatccatgaaaaaccggaaacagaagatttcatcatattgctgaaccaagacaccataccgagctcattcaggaaattcgccagcatcacaagcgccgcgaaccaagtcagcgtatcccatgcaccttgttcctttttgatgtcctcccatgttaatacctgtgacaaaagcaaaacggataatccgatcagggccgtcgtcgttgcgtcaatatttaagcttcctccgaaaatccacagcgcaagcactaataaaaagacgatgaccatggagagttcggattttttaaacggacccatttctttcaatttttccgttgcgattttagccgcatccggtgtttctttaatttccggcggatacagcttataaatgacgagcggcgtaatgattaagctcgccaatcccggtacaatggccgcgattgcccagcttgtccatgtgatgtccacccctgcgacatcgtgggccagcttggcgatcagcgggttcgccgccattgccgtcaaaaacatcgcagacgtaatcaagtttccttgaaaaccggtttttaataagaaagcgccgattttccgctctgttccgtctgccggcgttgatccgaaagtttcggataatgatctgataataggaaaaataatgccgcccgcccgtgccgtgttgctcggaatggcaggtgataaaattaaatcactgaaaagcagtgaataagaaaggccgagtgttttcttcccgaaccgttgtacgaatacgtaagaaatcctggcgccgagcccggttttgataaatccccgggaaataaaaaaggcgatgacaatcagccagattgtcttgtttccaaatccgcttaacgtattttcaatagatagcgttcccgttaacgcggtgactgccaatgcaaaaattgcaattgcgcccattggcaagggcttggagataaagccgataattgttgcgacaaaaatagcgaacaaatgccatgctttaggttcaagtccggacggcgcgggaataaaccaaatgattaatcccacagcaacagtaataagcaaaggaatgatttttactgcctgctgtttttttgcgtctttttctgaagccattacaggtctcctcctattttgttgtcttccatcccctatcccattttactacttaactaagttaataaacgtttttgttaattaaaaaacacaaaggaatattttcctttgtgcttcttgtttattattttaatatgcccgacccggctttagatataacatctgattttacatttgatgatgagccgatggaaccgtgcaatgacggtgtccagccgacggactgacttaatccgttggcggctgacgcgttaatggaggagccgtttaaaagagtgccgtcttcatgaagcgcttttccgccgctgaagacgctgatgactttatcagcagccagccccggcacttcaaagacattattctgggcatatatttttgacgcgtggcccgcgccccacgcatagctgaacgggtatgcggcgcttttcgagcctgcgtaaaaattattataaatatgaacctgcccgtaccggacccgcggtgcgcgctggacgatgttctggtaatagttatggtgaagggtcaccttcagttttccttcatccgacgtcttgctgtcgctgtttccgatgacggagcctttgtcatggtcatgatatttattataggacaatgtaatataattcgccccgttggctatatccgtctggccgtcatggtgctgatattttctcccgtaatagtagggaaaaccgctgtcgggattcgatccgtcattaaaggtgcaatgatcgatccagatgtgcgtcgcgccgttaatggtgatattgtcatattccgagttccagttgccgctgctgccgtccgtcgggtcccattgcggaaaatagtcgtaagcgtcttgaaattcaatgttgcggatgatgacattgtcgacgccgttctttatattaaaacttccgcctgtcactttggcatttgaacccgagccgatgatcgtcgtatttgaaggaatgtcaatcacgacccgtgccttctggtttttttgcgatcgctgtctggcgtcttcctgggtgcctgacggcgcttttttcccccatttgtccgggtcgtacgccttcagataagcattgagatcatatgccggatctttataatcattaaagccgagtgttttattgcggtcgtccgtattcatattgattgtgccttgtatgtaaataatcttcggcgtgctgttggcgcttccccctaatgcggaaacgagctgctgtctgtttgatacggtgtatacattcgatgaagaggctttcgcgccgccggttgtcccgccggaagcggctccccagccgtcatttgttcctaacgtctgccgtcccagatcagcggcatagacgtctgcagggatcatacataaacaaaccgccagcataaataacatttttttcatgaattgtgctcctcctgattctttgttccaatttattacaattgaattgtatcaaatcagttgagaaacagcaccgaaaatgtacagaatgtgcctttcggttttattgcggaaaccgcaaaaaaatcccaagggaccgaaaaccccttgggatctgttcagcttacgcccatgatttcactttttcattatccgtgacaaatagaagaacttttccttcatctaagcgcttttcaaattgtgacgcttcctcttctgaaaatccgatttcgtgaattttgttgcggagctcgtcgccttttttattaaacatattgccgactgcgtgtttaatgcccgtttctttcgctccgatggtattgacatcagtattatcggccaggcggtccgttctgtcgtcatcatgagaaagcacatatacgtcctcttttgcaacacccagctgctgaagctcttttacgtcctgcatcagtttttgatcatttgtatattctcttactaccggtttcattgataagtcctcccttttgtttttgtatatttgatgtttacccgctcaatcaaggatcaaacaaaagaaagagagttccgtgaaaaaacgggcaggttgtcggtggatattttcttgcgggacatgttacagtagaggaagctacatttatcagaaaaataaaaatcttcatgagccgattaagcagggaggtggttcctattcattacttttcaccggaacagcgatttaacgcttgggttgtcagtgatttagtgaagcaggtattccgccggcatacccgctgcccggatggaataaaagagcttacggcctttgctgaagatacttttcatattaatatcgatttcgttttctctatcattatcaatatcggtgatatcgaatccgttctgccgaaagaaattgaaaataggctgggttcttatctgaccgcgcttcagcccgtcgttaccgctgacatgcttcattcttcaaaaacgaatgcctatgaatatttggaacatgagaaaaacaccgatgtgtaccggttattctattaaatatgcatataaggaaagaagggccctgggcccttcttttttatggccgctgacggtttgattttgtaatcgggaaatggttcgtgttacatttggaacaaccacttatcttgaaggaggattcagtatgccgaataatcagcagcaaattcaattggcaagacgccccaaaggcgttcccgcccatgacgatttccgctttgaaacgattgccgttcccgaaccgaaagacggcgaagtgcttgtgaaaacgagttatgtgtccgttgatccgtacatgcgcggacggatgcaggatacaaaatcatatgtagagccgttcgctttagatgaagccataacaggcggagtgattgccgaggttctgacagacggcgataagctgaaaaaaggagatgttgtgatcggaaatctcgcatggcaggaatattcagccgtcaatgagtccgccctccgcaagttggatacggatatcgcacccgcccaggcgtatctcggcattttagggatgaccggactgaccgcttacttcgggctgctcgatatcggccgtccgaaaaaaggcgaaaccgtcgtcgtttcaggcgcggcgggcgccgtcggctcaacagtcggacagattgccaaaatcaaaggcgcgcgggttgtcggcatcgccggatctgatgaaaaaatcgcgtatttgaaagaggagcttcaatttgatgaagccattaattacaaaacggcggatgatattcaaaaagcgttggaacaggcatgtcctgacggcgtcgatgtctattttgacaatgtcggcggaccgatttcagatgcggtgataaacctgctgaatgaatttgcccgcattccggtatgcggagcgatctcatcgtacaataccgaaagtgaagaagaagacatgggtccccgcgtccagccgaagctgatcaaaacaaaagcgctgatgcagggattcatcgtcagtgattatgctgaccgcttttccgaaggtgcgaaacaattggccgaatggcttaaggacggaaagcttcattatgaagaaacgattacggaaggattcaacaatattcctgacgcgttcctcggcctgtttaaaggagaaaacaaaggcaaacagatcatcaaagtgagtgatctaagttaacatgatgatgaaaaaaaggagggctttgtcccctccttttctgtttatttgggatcagccgcgaagaatcaaagtaagaaagccgtcttcatccggctccgtatcttccaaagcgaagcccgctgcttgaaagcaggctaaactgatttgattgtctttttcgatgcttgccgcccattcccgcacgctggtaaacccaggatcagtcagcagtttttgcaagatctgttttccttacccttgaagctggtacaaaggattgacgatcaatccgatatacgcccgctcctccacaaactctatagagaccatgcctgccggaagctgcccgtcatatgccataatgacagtatcgtcttcatctttactcaatcgtgcataccacgcgtctaatggcagcatcgcatccattctccgtctgatgttatcgttcttaaaccagtattcaaggattttcagctcacgcaccttcaatatttgaaatctgtctattgaaaccatcttcccgcccccgcctgaaccttttccgttattttacaataaaaaagaagggcttcccgccctccgtttcttatttctcagataattttccgcctgaataaacggcctctttcagctcaattccgagtgatttggccatttttttcaatttggattcttccatcggcgtgacaaggctgagtacggttccttctttaccggcccgccccgtccggccggatctgtggatatatccgtcttcattcgggatgtccgcgtgaatgacgtacggaagatcatcgatatcgagtccgcgcgccgcaatgtcagtcgccagaagaagcggaaattctccccgttcaaacgctgataatatctttgcccgctccatttttttcgcttctccgtgcaggatgccgaggtccacatggtgataggcgagtttttccgcatagacgcttaaattcccgatatctctgacgaacacgagcgcctgcatgccgttcagccgtgacagtttttgcaaaagcttcactttatcccgctgatcacagacgagatattgatgtgtgacacgcgctttttccgccgtattccgctccactttcaaaacggccggttcgtgcgcgatggtattcagcacctgttctgtttccggctgcagcgtagcggaaaagcttaaaagctgtcggtctttcagcgtcgttttaatgatttttttcatcgtttcgcggtgttcctttgtcacgagctgatccgcttcatcaagaacgatcgtcttgacttcatgcattttcagctttttcgcctgaatcaattcgagcaccctgcccggtgtgccggcaatgatatgcggtttatttttgagcttctccacctgctttttcacgtttgcaccgccgatcaaagacaaagcgcgaagatcggagccttttttccaatcctgaatcacttgaaaaatctgcatcacaagctcgcgggacggcgctaaaatgatcacttgcggatgtttctgttccgggttgatccgctccagaaccggaagcgtgtacgccaatgtttttcccgttcccgtcggggattcggcaatgacgtctttcccttccatgatcacctgagcggctttttcctgaataacggtcggctcctgaaaacctgaggcctcccagttttcggcgataaatggttgtgtatgctgtaaaaatggccatgtttgggtcatgtcgttctcctcaattcttaaaatctactccatagtatctcaaatgcacgcgccaaacgcaattttctttttccttccaagccttttaacaaacggtctcctcctttataatcataaatgagaaagacacatgataaataaagcgtgtctgataacgatagaggtgtaatgatgagtattttatccgtaaaagatttaagccacggcttcggtgaccgtgcgctttttaacaatgtatcgttccgtcttttaaaaggggagcacgtcggcttaatcggagcaaacggcgaaggtaaatcaacgtttatgaatattattaccggaaaacttgagcctgatgagggtaaagttgaatggtcgaaaaacgtgcgtgtcggctacctcgatcagcataccgtgcttgaaaaaggaaaaacgatccgcgacgtgctgaaggatgcgttccattacttatttgcaatggaagaggaaatgaatgagatttacaacaaaatgggcgaagcagaccctgatgagcttgagcagctgcttgaagatgtcggtgtcattcaagacgccctgacaaacaatgatttctacgtgattgacagcaaagttgaagaaatcgcccgcggcctcggcctgcaggatgtcggacttgaccgcgacgtcacagatttaagcggcggacagcggacgaaagtgctgctcgccaaactgcttttggaaaaaccggaaatccttctgttggacgaaccgaccaactaccttgatgaacagcatattgaatggctgaaacgctatttacaggaatatgaaaatgcgttcatcttaatttctcacgacattccgtttttaaacagcgtgatcaatttgatttatcatgtggaaaaccaggagctgacgcgttatgtcggcgactaccatcagtttatggaagtatacgaagtgaaaaaacagcagctcgaagccgcctataaaaaacagcagcaggaagtggctgagctgaaagatttcgtcgcccgcaacaaagcgcgcgtcagcacgagaaatatggcgatgtcccgccagaaaaagcttgataagatggatatgatcgaactggcggctgaaaaaccgaaaccggaattccatttcaagcctgcgagaacgtcaggcaagctcatttttgaaacgaaggacttagtcatcggctacgatactccgctgtcacgcccgctcaatctcagaatggagcgcggacagaaagtcgccctgtacggcgcaaacggcatcgggaaaacgacgctgttaaaaagcctgctcggtgaaatccagccgctggaaggcacggtggaacggggcgagcatcaatacacgggctatttcgagcaggaagtgaaagaaaccaataacaatacgtgcatcgaagaagtgtggagcgaatttccttcctttacccagtacgaaatccgcgccgccctcgccaaatgcggcctgacgaccaaacacattgaaagccgcgtctccgttctcagcggaggagaaaaagcgaaggtcagattgtgcaagctgatcaattcagaaacaaacctgctcgtgcttgacgaaccgacaaaccacctggatgtcgatgcgaaagaagagctgaaacgcgcgctgaaagaatacaaaggctccattctgctgatttcccacgaacccgagttctacatggatatcgcaacggaaacatggaattgtgaatcttggacgacgaaagtgctgtaaacacaaaaaggaactcccgcccatgcggaagttcctttttttcttaatgtccggcttttattccggcgagatgtttgcgtcccatgagaaggacaagcatgccggcaaaaacgacgatcccgcctactgtatatggagtgcttgcggtgaagtgttctgacagcattcccgcaatccacggagcgagcgcaccgccgataaaacggactgagctgtaggctgaagacgcgattgaacgttcaaccggcgcagaacccatcacagcggttgtcatgatcgtattcaccataccgagaacagcaccggcgacaacgatacatgtaataatcaacgtctgatggtcagtccagatccccatgacgatgagaatgaccgcaaaggcgataaagagaacgacgagcgaacgcactgttcccagcgctttgtgcaagagcggcgccgtaaagactgacgtaattgccagcaataacccccagccgaagaagacgtatccaaggccgtgttcatctaaatccagcacgaacggagaataagcaagcaaaataaaaaatccaaagttgtataagaatgcagatactgccattgtcaaaagacctttatatttgagcgccttcatcgcatcaaacacaccgacgcgtttcgccggtttcggcagcttcggcagcatgagtgaaatcgcgcaaagcgctatgaacatgaggacagacactccgaagaacggagcgcgccatgagatgctgccaagctctccgccggcaagcggcccgacggaaatccccaagccgagtgcggcctcatacagaataatggctttggcgctgccgccgacagataccccgacaatgacggcaagcgcggttgaaataaagagagcattcccaagcccccagccgccgcgatagccgacaagctgagcgattgaacttgagcttccgccaagggcggcaaacacgatgataaaaataagtccgagaagcagcgtccattttgcgccgatccggcttgaaatcgcgccggagaaaaacatcataaaaccggtaacgagcaaataacttgtaaataacagagatacttcactaggtgaagcatgtaattgtgcggcgatcgccggaagaatcggatcgacaagaccgattcccataaaggaaatcacacaggcaaacgcaaccgcccaaacggctttcggctggctgaataagcctgttttctgttgtgatgatgtatccatttgaccagacctcctgtttcatccattaaaagaaacgctatatccatagcgtttacagcaaaatcattcgattgattgaatggcgcgttcagctttttctttcattccgttaaggcgcgttttaaaatgctgaaatgtgctgatcttctcatcaatcatctcaagctggtggttcaaagcgtgctgaatctcttccagcttttctttccgttccgtcggattcagtgacaacaagtacccctctttgtttaattccagctgacggctcatctccataaactgctgaagctcctgaagggaaaaaccgagcacttcttttgtgctggttactttttcgagctcctccatatcatcttcagagtaaagccggacgccgccttctgtccgtttaggagcaggaatcaaaccaatctcctcgtaaaaacgaatggttcgttttgtcaatccgcttcgcttggcaacttgatcaatcttcatccattccaaggtgaatccccctcttgtcgtatctgtttctattatacaccatttgaaccttaacgtaaacgtaaacttttatgcctgataaacttggtttggacaaaacgtttgtctttaaagcgccgggaaacatctgtgcaagataaaaaaagccggtatgacccgccatcttctcgggggccgtaccggcttttcttaattctcaagttcttcaatcatcagtgacaattcggtccagcgctccatcgccgcttcaagctcttcagccgtttttgcctgttcggccatcagttcttgaatctttccgaaatcacttcccgcttcagcgatttccgcttccagacgctgatgcttttcttcaaggccggcgattttgtcttcgatgccgtcccattcgatctgatccttatatgaaagctttttgcgttttttcttcggctcttcttccgcctttttctcttcggccggctgttttaccgccgtcttcttcgcttttgcgtgttccatgtattcactgtacgaaccttggaaacgggaaatgacaccttgtccttcaaatacgatcaggcggtcaatgacgcggtcaaggaaatagcggtcatgggatacggtgatgacgacgcctgggaactgttcgatataatcttcgagcacgcttaatgtttccgtgtccagatcattggtcggctcatctaaaaacagcacattcggttcctgcatcagtacattcagcaagtacagacggcgcttttccccgcccgacagctttctgatatacgtctgttgcatcggacgcgggaacagaaaacgctcaagcatttgttccgcggtgatgacatcgccttccgccgttttgacgatttcagccgtctcttttatatattcaatgactttcatatcgccgttcatttcgctgtggtcctgggtgtagtagccgatccggaccgtctgcccgatggtgatattgccgctgtcaggctgaattctgccggcgaggctgtttaaaagtgtcgttttcccgattccgttcggcccgatgatgccgattcgttcccccgggatgacaagctcattaaactggctgatcagcgcttggccgttataggtaatggtcacgttatcagcttcgatcacctgttttccgagacggtgggagccgatcgcgaaatcgagtgatccggagactgccggccctttttgctccttgagcgcctccgctctgtccactctcgctttttgtttcgtcgagcgcgctttcgcccctcttctgagccacgccaattcgcggcgcaggaggttttgacgttttgtttctttctgctccgccagcgcttcccgttcggcccgtttttccaagaatacttcatagtttcctttatacgtataaaggctgcctctctcaagctcgtaaattctgttcgtcaccctgttcagaaaatatctgtcgtgcgtgacaagcataacggcgcccggatattgcgataagtagccttccagccattcaatcgtttcattgtccaagtggtttgtcggttcatccaaaatgagcaggtcagccggctggatgacgtttttcgcaatcgcgacgcgctttctctggccgccggacagctcgctgacatccttcatcagatcggtgacgccaagtttggttaaaaccgttttggctaacgtattcgcctcccacgcatcattcacgtccattcgggcctgcgcatcaagcagctgtttctggcgctggtcattttccggttcttcattcagcgcctgaagcgctttttcgtactctctcatcgttctcatgacggctgatccgccggaataaatatgctcaagtacggtttgtccggccggaagctcagggtcctgatgcaaaaactcaatatgcacgtttcctgaagccgtaatctcgccttcctccgttgattcaaggccggcaatggttttcagaagcgtagacttccccgttccgttcgggccgattaaaccgattctttcattctcttcaatatgaaaggagatatggtcgaataatgtcttatctccgtatgttttataaaggttttccgcttttatgatgctcatggtccctatcaatcctcacgtaagttcatgtgttcattttaaatcaggcgctggaataaaactagtaaaaggacagacaaatttcttggaagagatcattttgtccgaagaatgtttccgcctctccttttatacactggaggtgaagaggtgatgacatgatcagcgtcagtttgtgcgttatcgtgaaaaatgaagaggaagtgcttgcgggctgtcttgattccgtcaaagacattgcggatgagattgtgattgctgatacgggctcgaccgaccggacgaaagaaatcgcggcccgttatacggataagatttatgattttgaatggatcgatcactttgcggccgcccgtaattttgtgttttcgaaagcggaaatggattatattctgtggctggacgccgacgatatactgacggaaaaggaccgtgaaaagctgattgaactgaaggcgtcgctttcaaaagaggtggacgcggtatccatgtattatcacgtcggctttgatgctcggggagaggtcagcttcagataccgccgcaaccgactcgtcaagcgtgaaaaagggttccgctggatcggagccgtgcatgagtatcttgaagtatacggaaacatcatagaaaccgatattgccgtcacacaccggaaatccgagaaaaagcactcgcctccctcagaccgcaacttgaagatttatgagaaaatggcggaaaacagtgaaacgatgacaccgcgcgatttgttttacttcgcgaatgaattaaaggatcacggccagtatcagcgcgccatcacgtattatcaccattttctttccacaaaacagtgctggatcgaagacgagatcagaacgtgccaatatctatccgattgctacagggcggtcggccatgaagaggccgccatgacgtctctcttaaaatcatttctgatcgattgtccgcggccggagttctgctgcaggctcggcgactattttgcggagaaacggcaataccggcagggcgtgttttggtatgagctcgccctatccgccaaaagcagtgatgcaggctttacccagctcgaatattccacctggtatccccatctgcagctctgcgtctgccactggcagctcggcgacaaagaaaaagcgaagattcataacgacaaagctgcctcctatcatccgtcacatccgagtgtcctgtataatcaaaacgtgctcggcacataacatcaaaaaaaaagagctgcccccgtatgaagggcagctccttattgattacgctgtcggaattcctccgcttacactgtaaatttgggatgtcacatagctcgattcttctgaggccaaaaagacataaatccctgcaagctccgccggctgtccggcacgctttaatgggacggccggtgtttccttgccgaatttcggaatgttttcaccgggctgtcctcccgaaatctgcagcggcgtccagatcggccccggcgctaccgagttgactctgattcctttattcgccagctgctttcctaagccgacggtaaaaccgataatggcatgtttcgtcgcggcataatccaacagcatcgggcttggattatacccttctacggatgttgtcgtgataatagacgcgccttccggcagatacggaagcgccgctttgacgagccaatacagtgagaatacgttgacttcaaatgtttgatagatttgttctgtggcaagatcgctgatatcatccactgcctgctgtttgccggcgacaagagcgagcgtgtcaagaccgccaagctcttgatacgctttttccgccaattctccgcaaaacgcttcatcgcttaaatctcccggcagcagaacggcttttcttccctctttttcaattaacgctttcacttcttcagcatccggctgttcctcaggcagatagttaatcgccacatccgccccttcccgggcataagcaatcgcggcggcccggccgatacctgaatcgccgccggtgacgagggcttttcttcccttcagcttgccggctcctttatagcttgtttcaccgcagtccggcacaggcttcatctctttttgcaaaccgggcggttcttgatattgttttggaaattcatcatgatcatatttcgtcagcgggttgtgcagatttgcatcagacatacaagactctcctttatcattggtgatgtattcgtatgtgtacccctgagcatgatggatcaaacgtgtaagtgcagtttccgattgataaagggaaaacaaaaaaggagcccgtaagctccctttttttatgactctccgagtacgttttcagccattttcgctaaatgctgggcgcttcccgaaatttcctgcatcgtggcagaaatttgttcaaccgccgccgcttggccgtttgtgttctggttgatggattcaatagagtcctccagccctttcagcaggctgtggatttttttcgtaatctggtcaatttggccgacgttgtcttttgaatgagtggcaagcttgcggatctcatccgccaccacggaaaagcccttgccggattctcctgctctcgcggcttcaatggccgcattcaaaccgagcagattgctttgatccgagatgcccttgacagtgacggaaatgtcggcgatttctcccgcgctttcactgacttgtttcgcctgagtggaaatcccggtcatctgtgctgagaaaccgctgatggattctgagatatccgcgatggccgaagcggtctgttccacgacggcggacaggctttcagcgacatcgtgaagcttggctgatttttcaaggctggtgccgagaccgacgccgccgatgacttttccgttttcatcgtgaagcggaatcgctctggcgatcagcggaaatccgaacagctctttcggcaccatgcttgtcttcttctgattcatgcggatcgcgtctgtaatgatgtcccctttttgcagcgggtctcccggctttacattaagagaaaacgttttagccggaatattcacgattaatttttctgtatcataaattccgatggtgatgtcatcttggatcaggctgtttaaaaaaggcgcaactttgacaaaagcgtcaagcaggctgtgcgtttgctgctccgtctgtatactcatttctttcactccttcttaatatgggaattgccgtttttcatgctgaaccgaaatccatttcagcgtggtgaattcttcaaggctccattcgccgttcagcctgccgagacctgattgcttctcgccgccgaacgcgacgttcggttcatcattaatggtcgtatcgttgacgtgaatcatgccggtttcgatccgcttagcaaactcaacgccgcgctcaacgtttgccgtatgcacggctccgcttaaaccgaacggtgtcgcgtttgcgatgcttaccgcttcatcctccgtttcaaacggcatgatgcagacggccggtccgaacagctcctccttcgcgatgctcatctcaggtttcacatcttttaaaatgacgggctcagcgaccgttccgctgaatcggccggacagcaccggaaccgctccctcttctatcgctttttcgacagaccgtctcagaccttccgcctgcctctcattgattaaaggaccgataaccgtatcagggtccatcggatcgccgactttcagcgatgacactttcgcttcgtaaagctctgtaaatttgtcatatacagatgtgtgaacgagcacgcggttcgccgacatacagatctggccttgatgcgtaaaccggctgaatacggccgcattgacggcgtattcaagatcagcatcctcaagcacgatcagcgcgctgtttccgccaagctccaacagcggttttttaaagtgtttgaccgcaagctgtccgatatagctgcccactccggttgagcctgtaaatgagataatccgcggcacgggatgctcaacaaagctgtcgccgatctccccgatatctgtcacgataacattgagcagcccgtccggtacgccggccgcttcaaaaattttcgcgataagcgttccgccgcagatcggtgtttcttcatgaggcttcagcacgacgccgttccccgcgccgagtgccggcgcaacagatttcatcgaaaggaaaaacgggaaattaaacgggctgatcacccccacgactccggcgggtattctgtacagtctgttttcttttccgtcaatcgtggacgggagaatttttccttccatccgcaccggaaatgttgcggcttcttttatcatatttttgacaagtccgatttcaaactcagccttcagccgtgttccgccaagctcctccatgattaagtaaataatcgcttcttcgtgctcttcaatgaaagaaacggcgttttccaaaatggcccgctttttaaaagggtttactttgtcccattcttgtttcgcaagagccgcggcgcgatatgccgcatccacgtcatcagacgtcgctttttggaatgaggtgatgactttttgagtataaggatttctgttttccaatacgttccggctgcttccatccctccatcggccgccgataaactgcttatttagttcttcatattgaaacatgtaaacatctccctttcaccgaaacttgaaattagttgatgagtcatcttttgtatcggtcttaaggtgagaaaattgaactatttcacaataaaattcccgttccttccgtgcatcgacgctttttagctttgtccttttaaagtggaaaattctttaattgactgcgagaaatttcgacaatataatacaaacgtcagtgtatataatgataagaatattatgaattttcaggaggacccatatgtctttactatttcggaaaaagccgctggccgacttaaaggcccagagcaaacagaccagcctgtcccgctcgttaagcgcttttgacttggttttgctcggaatcggctgtgttgtcggcacggggatttttgtgattaccgggactgtggccgcgacaggcgcaggaccggctttgattctgtcgtttgtgctcgcgggccttgcctgcgcgctcgccgcgttttgttatgcggaattttcttcatccattccgatttcaggcagcgtatatacgtattcatatgtcactctcggggagtgtctcgcgtttttaatcggatgggacttaatgcttgaatatgtcatcgcgctcgccgccgtcgcaaccggctggtcatcctatttccagtcgcttcttgcaggcttcgggctgcatcttccggaggcgctgaccgccgcacccggcagcaaaacgggtgccgtgttcaacctgccggccgttatcattattttggtcattaccgcgattgtttcaaggggcgtgaaagaaagcacccgctttaacaatgtcattgtattgatgaaaattgcgatcattctgctgtttatcatcgtcggtttcggctacgtgaaaccggaaaactggtcgccgtttatgccgttcggaatgaaaggcgtcatcacgagcgccgcgaccgttttcttcgcgtatctcggatttgatgccgtgtcaaacgcgtcggaagaagtgaaaaacccgcagaaatcaatgccggtcggaatcatcggcgcgcttgccatctgcaccatcctttacattacggtatcgctcgtcctgacgggaatgctttcgtacaccaagctgaatgtcggggatccggtatctttcgcgctccaatttgtcggccagaacaagatagcaggcattatttccgtcggcgcgattatcgggattacaacggtgatgctcgctctgctttacgctcaggtgcgccttacatttgcgatgagcagagacggccttttgccacgcatgttttccaaggttcatccgcgttttaaaacaccgtttcaaaacacatgggtgacggggatcgctgccgccgggatcgcgggttttattgatctgggaaccttggcgcatctcgtcaatatgggaaccttggcggcctttacggtcattgcgatcgccgtcatcgttttgagaaagaaacatccggagatcaaatcttccttccgtgttcctttcgtgcctgttgtgccgatcatcagcgcatgcttatgcctgtatctcgcaagcagcctgccgggcgtgacatggctcgcctttgtcatctggatcgccgccgggatcgtcgtttatatgatgtattcgagaaaacacagtttgttaaataaataaaaagggaggctcttttttctgtttgagaaagaagagccttttttgcacttgataattcattcaccttatgaataatatggtgtatgcttcgtttacataaaaaggaggagaatcactttggccattgccgccccgcttaaagaaaaacctgtcaatcgtactgagacaaccatgtattctattttgttcattatcgggatttgtcatctgctgaacgattcactgcaagcggtgattccggcgatgtttccgattttggaacgttccatgaatcttacatttacgcagctcggaatgatcgcctttacgctgaatatggtgtcttccgtgatgcagcccgtcatcggctggtatacggataaacgcccgatgccgtatgctttgccgctcggactcaccgcaagcatgctcggcattttaggtctcgcgttcgccccgtcttttctgacgattttatgctgtgtcttttttatcggccttggctccgccgtctttcatcctgaaggatcgcgtgtcgcctacatggccgccggcgaaaagcgcggcttggcgcaatcgatttaccaagtcggaggaaataccggccaggcgatggcgcccttgattaccgcgctgattctcgttccgctcggtcaattcggctctgtctggtttacgcttgtcgccgcagtcgctgtgctgtttctcatttatatcgccaaatggtataaaggccgcctgattcatttgcgcgccgtaagtaaaaaatcaccggcctccgctgtgcagaccgtgattacaaaaccgattattctcgcccttatcatgattatcttcttaattttcgcgcgctcctggtatgtgagcgcgatcggcaacttttatacgttctatgcgatgaatgcctatcatgtcagcattcagcaggcacagagctacatcttcgtctttttatttttcggagcagtcggaacgtttctcggcgggccgcttgcagatcgtttcggaaagcggaacgtcatcatcgtttcgatgatagcatcggctccattgacgatttttcttccgtttgcggggcctgtcatcgcctatggcgtactggcgctgatcggtgttgttctgatgtccagcttctccgtgacggttgtctacgcgcaggagcttgttcccggcaaaatcggaacaatgtcagggcttacggtcgggctcgccttcggaatgggcgcgatcggagcggttgcgctcggagctcttattgattcagcgggattgacgccgaccatgacagccgtcgcctttctgcccgttttaggtctgctcgcctttgtcctgccgagcgacaaaacattaaaagaatggcattcataaaaataatccctgccttttcggcagggattttatgtttcaaccgtataaaaatgagtgtcaggaaccgcatatttcggaataaacccgtctctgaaatcaggaaacgctttttgaatttcatcaatccatttttttacgtttttgatgtacggcacgtaaatcatattgactgtcgccttgtcatcaatgtgatagtaccagcacagattgaattcgttctccgtgacgagcgtaaagcctgaaaaatgataaaaaatcagcggggtgtcattgacatatacagccccgtcgcgcaggctgacgtcatattgctcaatattccacagcgccgcattcgcgccgatcgactccgtgacatgaacgtcttcaaactgcgcgggccacttttcaacatacctttggtcaccgtatgtctttttttcttcattcatctccaccgtacaataggagatacaatcctgtctccactgccagaccgcccgatacgcttccccggtattccgcgcgccgacaaacccggtgttgtactgccccgtaagcttgtaataagacgcaaaccgttctgaattgcggtgatccgtcagaaaaagggaagcatccggcttttccgcaaacagctcgcccgcatctgagaagaaaaagagatcggtgtccaagtgggcaaaatattcagcttcatcatactctgtcatcacatggaacagaaatgccggcttcagcgtccagcaatattcatgaaacgtccggccgccctttgcttcaagcagctccgggtcctccatttcatggagctgaaccgccgtgacatgttcccacggcacctgatgaagcagttcgtacgctttttgatcgacacacagcacatacagatgaaaatcccggcaatgctcatggagagaatgaatcatcggcatcagtttaaagatatgcgttctggaaacaatggttgaaaaatgatatttactcaccatatcacatccaatttatttaagatccacatgcagtaaatcagcagccagcgctttgaacgcccttgcaaagtacgtgacgcccagctttttttccgcttttgccaaaagctttccgacctccggcagattgaagctgttcgccgtgatacgcgggcttttcgtcttccagtccgggtcgaggttgcggtctttaaccgcgtgcagcagctcgagaaaaatgtgcagcagactttcatatttctcataatcaagcagcacttcgatgtctgccatcatgctgttggttaactccgcgtcaaacgggccgttaaacgcgaggtgtacgtcaagcgaatgaatgtcattgtacttgtcgcacatgtacgcgatattcgccctgatgtcatcaacggaagcgcagttgctcggatgctcctgatggacgctcatgatatcgcgccgcagctgaaatctcattcccgactggtgaagcctgatgccgagatcataatcttcaaaaccgtatctgacgatgccttcatcaaacaggccgagatctgccacgtgctgtctcttgactgacgaattgttcgtaatgaaaaaacgccacggcagacggtagcctttcaaatcatctccgtatttttccaaaatgcttttcagcacacggataaagtcggtatctaaatcaaaacattggtcaagaaaacttccgtctctgatgtcactttcatcaaggagcggctctttatcgcccggcagctcttcatacagttcggcgagtttttccttatgctctttttcaaaacggtcataataaaagctgtaaatccgcttccagaacataccgcatacgacaagatcgtcccggttctcatgagccttgatatgcttcgccactaaatctttttcagcaagcatatcgctgtcatggaagatcaaaatatcgcctctggcattgcggaccgcctgattccggccgtaagcgatccctctgttttctttaattctcacaaaaatcagcggaaaattcgcgctgaatgattcaagcatggataaggttccgtcttccgaaccgttgtcagccacaatcacttcgaacggctctgtgcattcctgttcattcagggacagcaggctgttataaagcctctccttggaattatatgcgggaacaatgacgcttgccttcacttttcgttcacttcctgtatatgatcatttatttgttatcatcctcagatgcaaaaccgctgaactccgggcagacggcgctgaccgtcccgatcacccgcttcagaatgtcctgataaagctgatggacaaacggcaggtcggtccggtccgtctcatgaatctgccgaatgtcgccggctgtgacgatccggtatccgctgaaatgatagaaaatcagcggacttccgtcttcaagcacaagacgcccgtcctcccatgaaaacgtgtggcggccgtaattccaatgtccgatattcacgccgggcgtggtgatgtcacacacattcgggaacaggccggacatgtaatccaagtagccttgatctccgaattttccttcgcccggcgcatttttgcattcttccaggcagcgttctttccaccatctgagacaatctgtgccggcactgtcggttttgaagctgagaaaaccggaattataccggcctaaaagacgctgcagcatgtcgatttcctgtttttcaaatgagggaatgacgatatcgccccgtgacagaagcaccgaacaatccggctgattgtcaaaaatcgcgcggggatcagcgaagaaaaacaaatcggcatcaatgtacgtgacacgctctaattccggatgtccgtccagcacgaattcgagaaataccggcttcaccgtccagcagtattcgctctgatccctcgtccgcttcagttcaaggagctcctcattttccagtgcggacacctggatcaaggtgacattatccggccgcattgcctgaagcacgtcataggtgtcgtgatccatacacaacgtaaaaatgggggcgtccgcctgaaccgctttcaatgagccgaacaaagcgatagcctgatacagccttccttttgataaaactgtgcaatatgcgcttgtcacgtctttctctcacctctgtttctgttacttttgaaaaaaggctttataccattcgatcgttttttccaatccttcatcaatggtatgcgcgggcgtccaattcagaagcttcctcgccttttccgccgataaatattggtgcttgatttcatggcttccctggttgagcactttcggcttgaggtcactgtccatggccttaagaattttttctacaagctccagcaccgtcagctgaatctcattgctgaagttgaacgcttctcccgcaagattgagctcctccatcttttccgccagcaaaagatatgcctcgaccgcatcctcgatgtaaaaataatcacggataaatgtgccgtcgctgcggatttccggcgcttcaccgttcagcacgagctgaatcgtctgcggaataatccgattgaagttcaaatctccgccgccgtacaagttgccgcagcgcgtaatacagaccggaagtccgtacgtattaaaatatgtgtggcttaataaatcggcacagctttttgatacgtcatacggatgtttgccctgaagaggcatgttttcatcgtacggcagtgtcggctggtcgccgtacgctttatcactggacgcgacgatcacccgcttgatgagcggatgcctgcggcacgcttcaaggatgttccatgtgccgagaatattggcttcaaatgtggaaatcggattgcggtttgcgacgcccacgatcgcctgagcggctaaatgaaagaccgtgtcaatttcatattcgcccagcgcccgctcaatcacatccagatcctcaagcgcgccctgcacgatattcatttgcttcacttgttctccctgatacaggttcgacttgggcacagtgtcacggacaagtcccgtcacattggccccctgatcgatcagttccttcaccaagcagcttcctaaaagacctgtacatcccgtcacaaacacatttttatttttccagaaactcaaacttgatcaccataccttccatacatgttgtccccggtcccacatgttgttgatttccagcagatttttatacgtatcgatcgccgtccagaaaccgtaatgccggtataccgccaattcgccgtctttcgccagctccttcagcggttcttcttcaaacatgacgtccctgtctttcggcagataatcaaataccttcgggctgagcacgaaaaatccgccgttgatgatgccgtcacttgaggttttttcagaaaagcttttcgccataccgtcttcaaccgtcagcgttccgaattgcgaggtcttttctataccggttacggtcgccgcagccccttttgattgatgatagctgatcagatgaaacaggttgatgttcgccagtccgtccccgtacgtcataagaaaggtttcatcaccgatgatatccttcgcctgtaaaagccgtcccgctgtctgcgtgtgttcccccgtgtctaaaaaagtgattttccacggctcggattttcccaatatccgcacttctccggtagagctgtccagcgtcatgctgtgattcttccagtcataatctaagaaatattccttaatcatctctcctttgaaaccaagaagcaggataaattcgttcacgccatagtattgatagagtttcataatatgccatagaatcggtttgccgcctatcatggcgagcggtttgggacgttcattggtgatttcgctcattctcgttccttttccgccgcagagaatgactgctttcatctctacccctcttctctgtgaatattggattcgaaaccgcccgtataagagaaaccaacccgataatttgtccgattctctatcaccggtttcaaaatctactgtaagatatgagagtttggcgccctttgtgaccaaaagctctctcttttttcagattggtgaagatacacacaaaaaaagagcctcacggaaattccgtaaggctctttctattatttattatcctgattcagcttttctttgccgtaatgatatttagacggatcaaccggcgtaaagtcgctcaatttgtggaatctgagcaagtctttgtacatcacgctgtcagacagcttcagctgctctgtgactctggctttcaggtttttcgtttcctgattgcctttcagttcttttcctgtcttcgtatcgtatacgacattggagatggaagtatatttcggcgtgacgtaatctccgttacggaacgtcaccgtatcatcatggtctttcgagaagagatcggtgccgaaattaatatatttcttagaatcgatgccttccaagtgaaggatcgtcggcacaacgtccatttccccgccgtacgtatggttcactccgccttttttgccggggatgcgaagcataagcggcacacgctgattctgcgcgttttgataaggcgtaatttctttgccgagaatttctttcatcgcgcggttatggttttcagagattccgtagtggtctccgtaaagcataatcaccgagttgtcatataaaccggatgacttcagatctttaaagaactgttcaagcgcctcgtcgagataacgcgccgtctggaaatagtcatccacagtcgcgtcgcccgttttcgctttttcgatcgttgcgtctttttcatcaagcgtaaacggataatggttcgtcagcgtaagcaaatgcgcgtagaacggctgtttcagcgattgaagcttcggaatggattctttgaagaatggtttatccttcagacccatattgacaaggttgtcatcagacatatcgtatgtgctggcgtcaaagaatttatcgtagccgatatgtttgtaaatctggtcacggttccagaatgatttgtagtcaccgtgtaaaacggcgcttgtatagccctcactttggtcaaggatggcaggaagcgattgatacgtgttttccccttttgtcacgaaggctgacccttcaggcagtccgaacaggctgttatccatcatcagctcggcgtcagatgttttaccttggcccgtttggtggaaaaagttatcaaagtacgtcatgtcctctccgccgcgggcgagtttattcaggaacggcgtgacttcttttccgtcaagtttgtaattgatcaaaaacgattggaagctctccaggtgaatcttaatgatgtttttgcctttggccttgccgaaatactcggcgttcggcttcgcataatgcgacgatgtgtagttttcaacgctcgtcaggtcatcgctgctggcatatgcccgctgtgattccgtctgcgccgtctgtacgccgtcataaatcgtgtaattataaaggcctaagtattttacaatgtaattgcggtcaaacgttcttgtcagcagctccgggcggtcctcttcggcaatcgccaggttcacgaagaacaacacaatacccgtcacgataattaatgacgtataccgttttttcagcttgaattccttcagctcacgtctccacaccagaagcgcgattaaaataataatatcaacaaagtataaaatatcatggccggacataatgctgaagatgccgtctcccatatttccgacattaccggattgctttaagttagggaatgtcaagaaatcatcgaagaatcgatagaataggatatttgcatacaaaataaacgtcatgatgaaatcaataatcaccatgataatcgctgatttgcggcctttcgcaaacaatgccagtcctaaaaagaaaatggcgcttgagaacggattgatcacaagcagaaactgctgcgtcggacccttcaccccaaggttgaattcagcatgataggctaaatacgttttggcccaaaacaaaataatagccagtacaaaaaaactaagtctgtaagaaaataatttcttcatggcaacctctactttcctaaacactttaaatctgtattcttactttttgcttcaattcctgctttccgagcaaaacgaaagcatcacacagccccataaacacaccatttaaaaaaacgatatatttatcattcgtgtcatgcccattgaacatcttatcccgccagccattagacgcaggatatccgttcttcgtttcacatttttttctggcattaaaaggtaccgtatcagacccggtctgaaaataggagataccaaatataagaataacacaaacttctaaaaacgaaaaatgaatatcaaagacagccgcccaacaggcgggctgaagttattgtatgcaaaggggctgaaaaacttgaaggtttttttggctgatgtaaaaaaaggactggagtcatccagtccttttcatcaaatcggtcaaatccccgcccaaacatcttttgcgtaaatgccttttgtctggaggtccaaaagccatttttgcgcttgccgttcgtctgtttcgcggaccgactgatacgctttttgcagcgttgcctctacatcgggcgccattttgctgccgtcgccgcatacgtagaggtgccctccccggccgaggatggaaattaaagcgccggcgtctttcgccattaagtgctgcacatacgttttcggtacgccttctttgcgggagaaagccgtatgaagcgtcacgattccgtctttttcataagcttcaagctcgtcacggtaaataaaatcatggtcgtttctgcatccgaaatacagatgagcctcccccagctcttttccttctttttttaacgccgcccgggcctgcagaaatccgcggaacggggcgactcctgtgccgggaccgaccataataatcggtttttccggatcttccggcagccggaatcgtgtttccggagtgcggacaaacatcacgataccatcctcagggccgcggtccgctaaataattcgaagcgactccgcgatactcacccaaaccgctccgggcgggaccgcgaacgacgccgacggtgattgaagcctgaccgggatttttccgaggcgaacttgaaatcgaataataccgcggcttcagcgggcgcaaaagctccagaaatcgttcaaacggaagttcacacgcttcatatttttcaaggagatcgagcatcgagacgcgcgatgttaagatttgctcctgatagacgccctcctccagaaaatcttccaattcccgtttgtgcggcggacagaccgtataagcggccatttcccggatttgagctcttgatgccgcttcctgcaattcgacacagctgctcagaagctcatgcagcctgaccggccgatcaagcgggagatgagccgcgctctgcccgctggccgtcagcagcacttgatcgttcccgttcagattgaaccggcggagaacacggctgacctgctctttgctgtttaccggcagcacgccgagatgatccccttcatgataggcagcctctttcggcagagtgatttcgatatgccttgtgctccggccgctttccggcgcctgaagttccctgttttccgcaacggatgcgtaaaccgcttcatacgtctttgccaacggagacccgccaagcccgctgacaaattgaaggcccagcgcactccgctctttttcggcattttcattcagcttgagaccgaatgccttcatggcgtccgtccacatgctttttttccattcatcaagctttccttcaaaatcgccgctgacgtccccttcgcctcgggaggaaaatcgttccgcccctttttcggcaagcttctcatcaataagcctcggcacagcctgatatgtcgccgcccagttatgatcaccgcagccgaagacggcatatcggacgccttccagttccccgggtttgacttcttcaagccattgaacgaattgtgccgcgttgctcggaggctttccgttataagaggacgtaatgatcaagagagctccttctttcggcagttttccgatccggtcatttaaaggcgccgtttcagtccggacgccgtgcatcccggcagtatcggcaagctcccgcgccacgccttctgcggttcccgtatctgagccgtacagaatcagaagcggtcggttatcaagcccgataatggatgcgccttttgtttcccgtttttctttttcgacgtcttccgccgctttttcagccgccgggagagctgccgcaacggctcctttgtttctcggccgcacccggatatgaaagtcgccgggcttgatcgttagtgtctgtttaatatcgagctcataatcggtgtgatcgataaaggtaaaatgctgcagaatcatccccagaacaagggttgcttcatgcagggcgaactgcataccgatacacgccctctgaccgtttccgaacggcttatacgcatggtgaggcacttgatcaggatgttcaaaccgctccggataaaattcctccgcattgtccccccacgcgtctttatcacggtgaagccggggaattaagacggaaattctgtctttcggcgtgatcggatatttcccgccgatcaccgtatcctctttcgcataaaggctgaacgcaggcgcggtcggccataagcgcaatgactcctgcaaaatcattcggatataagtaagatccagcacttgtttatatgaaggaacgggatcggtcaaaacccgatcggcttcttcataggctttttccaaaacacgggggtgtttcagcagaaagtagatggcaaaggaaagcaggccgctggtcgtttcgtggccggcaattaaaaacgtgatgatttgaaaccggatattttcatcatcaagtttttcgcccgtttccgggtcttccacattcagcattctggccagcagatccttttcatcccggccgcctgaccggcgctctgcgataatactgtctactaacgaaaacatcgcctgaatgtcatgatgaaattggcgcttcgtcctgatcataagcttatcctgaacatcaaggcgctgcatttggtgcatcgcttcatcaagagcgcgcaccatgctgttgataaacggatgaggcgtttccctgtaataactgttaaaccgatagttaaagccgcaaagcccgatcgtatcgagcgtcaggcgggtcatatcagcaggcacatcaacggcctcatccgggttcagcctagcccacttttgaatcagctgcaccgcgatatcagtcatcatcgaatgataatctttcatcgcgcgctggctgaaggtcggcatcagaatattatgcgcctttcgccagttaggctcatgcgtccagcttgtaaacagcccgtcgccggaaaacgcccggactttctccaaagccccttcaatgcttttatcgaaccgctcttcatcacaaacctctttcaccagttcatggccggacacgacgataatggcgcccgccggcgtatgcagctgaaaaataggcccctgctcgtttgccagtttgataagcgacattgtaggcttgtctttatcaagcaaaggaagattgccgagcgggccgaatgtcttcggctgcggaatcggacctgtttccttcatgaataacaccctttctaacaccttgatgcgttccttccaactacattgcccttttcaccggccgattatccgccgtcacggatcaatcatcggattgacgatcgataacggttttttctatactggagaggcttgttaaatacagaaataaggtgagttcacatatggattttgaaatcaagtttttatcgttttacgtcattcaagtggaaggaaaagacgaacaggcaaacaagcagttcaaacatttccagacgcttgatacggaagaatttgaagaaagcgagctgaaggattttcttgacggggaattgaagaaaatcgtcaaacggaaagccgaacggcatccgcaatccgagcaggtccccaccaaaattggccattttatcacggagccgggccatgagcttgattcaaatccgaattacaaccttttcaaccgcgccagacttgcggatacgaaggaagcatttatcgaggcaagcgagcagttcgtccgcacttaccttgacacgagcgccgtgcgcggcggtgtctttatcgtggcatcggccgttccgcgcaagtattttgaagacaaattcgtctttatgatgaaatgcgatttcgagccgaaggtcgcccgcatctcagacgcctcgtctctcattaaaaaggtcgaaatggccatcacgacaaaaaacatgaaaagcattcaatatccgtatatgccggaagaaggcatgactgaggagcatgagctgaaaatccaccaggcctcgcacgcccgttatttcgaagattttctcaaatttgtcgaatacggcgaatcgatgccggaaatcatgaaaagccaagtcatgaacatggtgcaggaacacgtgtatgaaacgtttgaagaaaacagcgaagagcttcagcagtttgagcacgacattgaaatttgggaagcgagtgaaaagcgggaaattcaggagcgcctcgacacccatcaagtcatcgaggcatccgcgcagatcattgaacacacgccggaagccgagctgaaaatgaaagtcggagaaacagagattaaaggattactggctgatttcggcgaatccatccatctcgcaaaagtgaacgggcgctatgtcgcgctcattgaggcggagacgatctcgtttgaaaaaggcagttcgccggtagagtttcacaggcctgaggggctgcatgaggtgattgagcggatacggaataaatctgaacaagactgacaaaagtccagacgccatgttctggactttctttatttaataaggctctttgagcaatcgatagcattcactgatgatgtcttggacgccgggcgttccctttatctcgcggcggacgatttcagatgagagattctgcacctgtaatgcccgctccgcccgtctttcgaagtatgcttgacatgcagtttcatggttttcgtgcttttgcagttcttcactaagcacaatcgcgtcttcaatcgccatcgccgctccttgcgccaatgtcggcgctcctgcatggacggcatccccgcccagaacgacgcggcctctgtgccacggttctttaaccgccatctgttcaatcttatgaaacaaaacgggatattcctttgacatattctctgtcacaaacttcactcccggaattccgcgcagcaagtctttcacccgttcaaaacgcgtgtcctcgtcatccctgaagtcagcgtcatacggccggatgataaatacgtatcctgttttttcagagagaggcacgactccgacctgcgtctgcccttttttatacatcagtgtcgaatcatgaaatatcggctcgggaaaagaaatgtaaaatctgtgcgctcccatgccgagatactccgttttcacttctctttgcagcatttgatcgcggacagcggagcggatgccgtcaaagccggcgagaatgtcagccgtcatcgcggttccgtctgcacaatgcaccgttatgtcatctgccgtttcttcgtaagacacgacttttttaccgagcagaatcgtgacccccgccgcttcagcatgctttttgaggatatcgtttaacgtttgccgcaatatattattccgccccggcaatgaatcatctaaaaacgcctcactcactttaaactgcagcgttccgttttcatcatgctgcttcagccattccgtttgaaagccgtgttgacagcattcatcatacacaccgatttcccgcagcacccgcagcgcattttgaggctggagaatgcccgctccgctttttcgcatgccggacgccgcctcgcaaagggtcacttcaaaacccgctctgccgagagaaatcgctgcggacaggccgccgatccctccgcccgctatgatgatctttttcacttcattgttcatcacgataccgccttcactatttatttattattcattaactattagccaccttactatataggctgaaaaactgtcaatctttataggttgccttttgaatccggcaagcttatactttgaatcactaaaatggtacggaggcttacaaaaatggagttgagacatttgccggattactcgcagattgccggacgcgctgggatttacgccgatatggatgctgaatcattgaaaacatttttgacgttatttgatatgtctaaaaaaatgaatcaggtcatggagcattatttctcaagtcacggattgtccgaagggaaattcaaaattttaatgtttctgtttgacgcacccggccacagcctgagtccgacagagctggcgaaaaaatccaatgtcaccaaagcgaccatcaccggattgatcgacggactcgcacgggacggctttgtaaaccgcagccggcataccggcgacagacgaaaaatcagcatcgaactcacaagggaaggaaaagaaaagctgatgctgtttcttcccggccacttctccaatatttcaggagtcatggaaagcttcaccgctgaacaaaaagcggaattgacaaaaatgcttgaagtattatttgataagcttctgctgttttccggcggcagaacataaaaaggcgcccctctcagcagggcgcctttttcgcgcggttaatcatcactgtttaaaattccgaaaaaccgtagcaggttgataaacaagttgataaagtcgatataaagcgtcaatgccatcaaaggaatcaaatcagccgtgatgtcccggtgcttgatctggttcagatcgtataagatgtacattgaaaacacaatcgttccgatgacggaatacgccatcatggcggcggaattcagcgggctgaaaatattaaagatccccactgcgagaagcgcgataacagcgacaagcaagaaggaccataaaaacgacaagtcctttttcgtcttagcgccaatcgtgccgagcaccgcaaaaatcacaaacgatgaaccgaatgcctccaatacgacataggcccccgctgcggacgcataatggctgataatcggaaacagcgtcattccggaaatgaaagcgaatgaaaacacaaacacatatccgacggctttttttcggcgcagccaaaatgcggcgatgatcatgacgacctctaagaccgacagcggcagcatcaatgccggcggaatgaactggcccgtatacaggccgattgtcgcaactaacagtgtaaacacaaataccgttataatgcgctgcataatagattgtttgctctcataagcagcagtttgcatgtcaaaagtcctcccaaaaaatgatcgtgataggtctattataaataaaatgggagaaatttgtatgattttaagaagattttaaggatgtcaggcctgacgttttgctgcgcactcctgcatatccatgaaatcatgcagttttttcgtcaatccgccgtgcccgaatcggatattccccttctgccccggcgttttcgcgaaatcgagaaatgccagcacataaagacgcctgacgggaatcggaatgacgcccgcatcataaaaccagccgtcaattgtattgagcacgcctttgttaatgccgtattgcttcgtgcaccaatgcagaaagcgcacttcgggcaggtgcagataccggctctcccggaaaggaacagttgaatgcttcatatgtaccgcctcctgtcattggctgttttttaagattgttttacttctttgctcttcagggaaaatcgatatttctccaccttatcaatttgtgtcacttgggaattatgaaccgtaatctgaacagtcccgaaatcgagcgtttccagcgcactgataatcttttcgatcacatgcggatctacgtttcctttggacgtcatcatgctccccctttatgtctggccgttcgtcttttgacaatgagtgttttaattcatactattctgataagaaatatataattatactattatgttttcattcagaaatcaataacatttacacaatttttggatatgttttctttgcgaatactttcacttccttcgctttgacataaaccgtgccgccgacaccggcccccaaggcgtcatattgctctttttaagaacgcaatcttcacgttccgacatatttacgttgttttccgctgacaaaaaaagcgccccgcctctggacggagcaccttttttctatgcgtttgcttcctcgatcacacatgtgacacccatgctggcgagcgcctgctccagggagccgtatgtttgatactctgaaaaatcaagccccaattggatagaagtctgtgccacatcaggccgaatgccggaaaacacggttctgatgccgaggagaaataacgttttcgacagcatatacaattgctgcgccaccatcgtatcgacaatgggcacaccggacagatcaatcacaagatttgtgatccgtttggcgacacagttttccggcaccgactccaaaatcacgcgcgcccgtctcgtatcaatcgatccgatgagcggcagagtgccgatcgtatccgcgatcaaaataaccggacagctcaattcggaaataagctcctgctgagatgacagcctcgcgatcattaatttctgaaactgttcagtaaaatccgtcatcagctgatcaaacgagccgttgacaaggtgattccagcggcgggcatcctcatttgttacgatgtcctgatgctcatccataaaacgggtgaccgcctcccaaaagacggttcttgaattgccgatcgcctcaacgacctcatgaacctccgcgtcttgctccactctgcttttcgctacctgtgcggcccatttttctttgttatgctgaaaaacggccggatcttccaaaaaagcgcttgcgatgaccgtgtttgtaaaggtatgctgctcgatcagcagccgtttcatttcctcacttaattgatccgcagaataaaaacgccctctcagcttccgtctcagcttgagccatttttccgtcagctctgccgaatgtgtaataatataatcatgaagtaattggtctttgttcactgccgtctcctctttcaagaatatgtacttttgtctaaattataaatcggaatcgccgatcgcactagagaaattaaaaaaacccgcacattaaagcttttgattgcttttttcggcaggaggatacactataaaagaaatgaaacaggaggtcagtatgatgatcaaaaaaatcgcgacagtcgccgtatacactgatgatcagcaaaaagcgaaaacattctggacggaaaaagcggggtttgaaaccgtcgccgagcatccgatgggaccgggcgccttctggcttgaggtagcgcccaaaggagccgccactcatttggttatttatccgaaagcgatgatgaaaggggccgagcatatgaaggcttctatcgtatttgagtgtgaagatgtcttcgccgcatatgaacagatgaaaaagaacggcatcacctttttagatgaaccgaaacaaatggaatggggcagtttcgtgcaatttaaagatgaggatggtcatgtctttctcctgaaatcgtaatccgtcaggcaccccaattgactttgagaatcattttcatttaaaatgttggataaagcgtgaaatgattggagagctgccagatgttcgtacaaatcagaaaaatgaccgtaaaagaaggacatgccgacaaagtaatcgaacgcttcagttcagaaggcgtgattgaaaagcaggaaggtttgatagacgtaacagtcctggaaaaaaaagtccgccacggtgatgaagaagtcgtcgtgttaatccgctgggagtcagaagaccattggaaacaatgggaaaaaagcgaagaccacatcgcggcccacaaagcaaaccaaggcaagccgaaacctgattatatgcttggaacggatgtcggtatgtatcatgtcagagccgttaaaacaggcgtacatgaaaaataataaagagcatttgccccagggcaatgctctttttattttttctcctcatacggcaggacaaacagcggtttatcgggcttccattccgcatacagcacgtcctccgttcttttgatgttcagctttttcagctcctgagtcagctgcttttcttccagcccggcttctttcagattttcatacagcacttcgccgtcaataatcagcgtgaccggcaaagagacctgcttcggctttatttgcatgtcgccgtttttcgtcgtgtcatattgaaatttcggcaggacgctgaccatcccgtttgtttctaaaatcgcgtactccgcttcctgtatggaaaagcaattcgcctgtctgagaaggctttgcaattgattaatgtccagcttattctttttcagcacatcatatttcagttttcctttatgtatgataatactcggctcgccttccaacagctttctggagctttttactttctgcgtaatcagttcgatgagataaattaaaatcccccataacagagaggcaaaaatgatttcaaaaatcctgacgcctttatcatacaccgcatttccgaccagttcgccgaggatgagcgcggaaataaaatcaaacggcgtaatttgcgagaattgagtttttccaagcaattttaaaatcacaaataaaatacccaaaccgcatactaactcccaagccactgtaagtaaatgtcccatattcgcaccttcttcttaaaagtcattaccattatggacattcgcctgttttctatacagcggccggcaacacacaaaaaaacgcagccgaggccgcgttttttcacttctgcttactgttttcgattcgatctgacgacccgtaagcacacctcagcggcataaccggcggccgctccggaacccgcaaacatcgcggcaagccccaagcccattccttcccagccgccgacaccgaaaatgctgtaaacaaccgtaccgaaagcagtcaggcccagcaccgccaaaaggcactcaggccacatctttttcggccatttcttgcggagcacagccgatacggcaaagttaagacaaaatgcggccagacagatcagataaaaaaaccccatgtcttttacctccgtcatgagaagctttttatttactcacctttttttcaaacaaatgataacccggcgcgagtccttttgattcgtaccccattccgctgtaaaacgactgaagcgccttgttttcggacacgcaatcgagccggattttcgtttttcccggacaagacacacccgtctccgcccaagtcatgatcgtccggccgagccccgcccctgcaaaccgcctgttaatcgccagccggtggagatatacggactcctcatgtccttcatcgccccatagacgtctgtcccacccgcttgcttcgggaagcagcatgacgacgccggccagctcttcattctgcctgaataaaaaaacatacccttgggcgatcgcctcccgcatattgtgggtatcttccccttctagaaggccgctccactggttcgaccctttatcgcgaagccattctgccgcttgcacgagcagatccatgacctcttcttcatcatccttccgggcggaggtgacccggaatgcccccgccttctcctccgtgatcgtaaatggtgtcataaaatcctcctgtaatcagaatattcgacacctttattatagaccaaacgcagaaaggaaaaaaacagccgtcgtgtttgagggccgtttaaaaaattttcttcttatcacgttcttcttttaaaatctcaaccgcttccctgaaacgcatagagtggacgatttcacgctcacgcagaaaacggagtgaatcattcaggtcagggtcatcggaaatatcaataatccattgatacgtcgctctcgccttttcttcagccgcaatatcctcatataaatcagcgatcggatctcccttcgcctgtatgtaagacgctgtgaacggaactccggccgcattgtgataaaacagcgcgctgtcatggttgacgtaatgatcactgagccctgcatcacgcagctgctccggggtcgcatcttttgtcagcttataaatcatcgtcgcaatcatttctaaatgcgcaaactcctccgtgccgatatccgtcagcaggccgatcaccttgtcaggaatcgtgtagcgctggtttaagtaccggagcgctgcggccaattcgccgtccgccccgccgtattgttcaatgagaaacttagccagcatcgggttgcatgtactgactttaaccggatactgcagctttttttcatatacccacatttacagatccctccttatacttgccatggccaaggaccgcggccccagtcccattgagcgccggcctgactcacgccgaattgcagaagcggtccgtactcaggctcaaaccgctttctcagctgtcttgagtaccgggaatattcatgaaactgctgaagcgcgagacggtcatggggatgcgtatccagataaagcgtcagctccaccaagacaaagtccgccgcctggatttgctccagcagccgatagtattcatcatcaacctttttcgccatattcgattcccccccgataaggattatcatagaaatcgtaaagatccttccaaagggtcccttttctcaatgcctccatcggagaaaactgctccaagtgatacggctgaaaccgcatataaagatgcggcggcgttctgtagtattttctccctatcggcgggcagggatcaaaccggctgtggaagggtttataggatttgaccggtgtaaacggctgattttctttcattacgatcctcctttcctaaacacatgaccttaataggtatgaatccgtatcggcatttatgccctgtaagaaaataaaaaagcccgctgcatagaaacggtcacaaaaaaaacactcttgctgttccaagagtgctttttcccgaatgatcagatatattggctgtcccgatgatgatgatggaacgggtagccgccgtagcctccgccatagccgccgaaaccgtaccccggatatcccccgaagcctccgtagccgccataaccgccgtaaccgccgtaaccgccataaccgccataaccgtatcccgggtatccgtagcctccgccgaaaccatgtcccggatatcctccgtagcctccgtagccgccaaaaccgtaccccgggtagcctccgaagcctccatagccgccgccaaagcctccgccgtaaatcggtcttctttcattcatgatttatcgctccttcacataggttacagtccagtttatgacatccggaaggaaacgtatgggcatccgcccagttttggcgaaataatcaataattgcttacggagaaattcgatacaggccgaccgcataagcaaaataaaaaggccggaacttatgccgccccggcctttttgtctttattcgcctaaatctacattgtgataaacctgctgtacgtcttccagatcttccagcacatcgatcagcttttcaaattgagctttcgcatcttccggaagctcgacttcattttgcgcaagcatcgtcagctccgcaaccgtgaactcttcaacgccggcatttttgaatgcctcctgcaccgcatggaattgatcaggctcggcatatacgataacactgtcatcctcttctaaaatatcgcgcacgtccacatcagcttccatcaacaattccagcgcttcatccgccgtcttgccttcaacgccgataacggcagtcgcatcgaacatgtaagcgacagacccgctcacacccatatttccgccgtttttcccgaatgcggcgcgcacttcaggcgccgtgcggtttacattattcgttaacgcatcaacgatgatcattgaaccgttcggcccgaaaccttcgtaacgcagctcgtcaaagttctcctccgcgccgcctttcgccttttcaatcgcacgctcaataatatttttcggcacactgtacgtcttcgcgcgctcaagcaccacttttaacgcctggttcgattccggatctggctcgccttgttttgccgccacataaatctcacggccgaacttcgcgtaaatccggctcgtatttgcgtcctttgatgctttcttttctttaatgttgttccacttacggcccattttgttccactctctttcacgaattgaatctgtatgataaatactctgcttctattatacctcagcggttgggttgtttcgagtgtaagacattagaaaaaacaggcacgcttaaaatcaccggagcgcagtaagccgaatttgagggttattgtacataaaaagcctcccttcatacaggaaggaagtcgcaagccaaaagattcattttattcttattacctatttcctacactgtatatcctgactcacgtggtaaaattttgatatcgaacaaaagaaaggatatggtcatgaaagttttcgaagcaaccaccctcctcgccgccgccaaacagcgcgcgggtgaatacaaaaaactgcgcggccagatggtcaatctgaaaaaagcgtttcaaggcatggctgatcttggtgacaatgatttctccggccggggcgcagacaacatcaaagcctttttccaagaccacgccggcgtcacagacagctggcttgatctgatcgatatgaaaatcgcatttctcacaagccttcccggcaaggtcgaagacgccggactttccaattcacatgtggaggaatcatttctggaacacgagctcacccacgccctcagtaaatcaaaggcgattatggaagggcaaaaaaaggacatggggtccatcctcagagagatcgaagacatcatctcgcttgatctgttttcaaccgaaagcacagatcagaagctttcttcagctgacaaaaaaagaagcgaaacgatacataaactcggcaagcttgatcacgatctaacgaaggaatacgcagaaaccgaagcgaacgaacagttcatccagaccgattttcagcagctccaaaacgctacgggaaaagggaaaaacgctactccgcttcactacaacgccaaagcgtaccgagaaagcgacatccataagaaaaaaggcgatatcgcaagacattcggatgcttatttgacgattaaaaaggaagaagcgaaagagcgggagattgaaaaactgaaagaaagactgaaaaactacgattatgcgaatgccgatgaattctactcaatggccaaaacaatcggctataaaaacctgacaaaagaacagcagcgctacttcactcaaattgaaaacacgcgtgaacttacagacggtttcaaaggcgttgccgtcggcctttatgattccggaaaagacgcggtcacaggcctgtgggatatggtcacagatccgggcggaacggttgaagccattacaggagcggtggctcacccgatcaaaacgtatgaagcgatttcagcggcaatcgaagaatcgtaccaaaaagacatggtgaatggcgacacctactccagagcaagatgggtgtcatatgcagtgggcaccgttgtgacatcagttgtcggcacaaaaggcgtcggcgccgtctcaaaaacaggcacagccgccaaagtgacaaccaaagtcaaaacagcagcaagcaaatccgtcacagcacaaaaagcgataacggtctcaaaacaaaccgttgatcacatcaaacaaaaagtaaacacaggcattgaagtatcaaaaaaacgtgtcaaaaccaagttaaatcaaatcggagatctcaccctggctgatattctcccgtatcatccgcgtcacgacttagtgccggcgggcgttccttacaacgcagtcaacggagtcacactgaaagaaggacttcagaaattcgccaaggtcatcctgccgaaaccttacggaacctccgcaagcggcagacggacaccggtaccgcatgtaccaccggtaacggtcaaatacggcgagcattttgcgaaatggaccagaaagaaagtattgaagccgaatgtcatctacaaaacaaaagaaggctacacgtacaccactgacaactatggtagaattacaagtgtcaaagcagacttgcagctgggagaagcaaaacgcaaccaatatgcgcagtcaaaagcaggtaaaccagaccgtctgacagatgacgacggaggccacctaatcgccacccaattcaaaggctcaggccaattcgacaatatcgtgccgatgaattctcagattaataggagcggcgggaaatggtataaaatggagcaagtgtggtcaaaggcattaaacggaaaacctcctaagcaagtaaaagttaatatagaacccgtttatcagggagattcactaagacctgtattatttaatgttgaatataagataggtaatcgtagagcgagacaagttactatagaaaataaaccagggggttaatctaatggaaacaaaaaagatggaagtgctatatcaaaagattgctgaacaaattaatgatatgatcccttccgaatggagcaaagttgttctttatgcggaaatactagacggttccagagaagtgtattttttctttcaaacaccagaaaacgatgagtatatatactctcatgacattccagaacaatttcaagttagtaaaaaaatttataccgaactattaatagatcttcaagagttatttaaacagttacacaatgagtttaaagaaaataatcctgaagcatggacaaatttgacactgaatcttgaaagcgatggaacgttctcaattgattatgattatgaagatgttattgaatctgatttggacgaatacgaaagacaaatgatttgggagttcaataacttgggtattttccccgaagatgaagaagacaaagaatttgttaaggattatctaaatattaagtaatggcttcgagaataatgataaacaaaacaggcagcatccagtaaacgggtgctgcctgttacatcgttatgtatggtctgaagaggtcattaattttgttttttaaatatgaaaatagatatgacggtaaatatgatggctgtaatgacaatgacctacaagctcgcgaaaacaggcgccgccaaagtggataacgtcttggaagccggtgaaaaagcgactgcaaaacatataaaaaaccgggattgaaaaaggacaaaactacatcaattccttttcgaaaaacaagtacgaacccgcgcttgccggaatagcacaggatattgaaaatactcacaatgtgaagaatacgcctttattgaaaagtattattgaagagcagaaagagagtgttctcagaaaatctgtgaattctggcaatagcgatatacatagtgttaaacaaggagacagcagccctctcgaccgggtgggggtttagctgctcacgaggcaaaaggcggacaccttatagaaagacatgttggtaagactgaccaagaactcctgaaaaggcttgaaaaaagcaaaatgagtaacaagaaaatatccggatcatcatcttttaaggatagaacaactgcagaaaaggttgctaatattactttattaaataataaagataaaatagaaaaatggttaaataatcatgatatgaaaaaacctttagtactctcctataaaggatcagaagtgttaggcagaggaattaccaaaggctcagccgaaatttctgacttaactaatgctaaaataatagttggttgcaccccaccttgtgcaaatctttctacccatttatagccataatcagtagaaaaatacgcatgaatataataagggttgattccatttttatatctaactttaaatatattgtcacctaacgttgcctttccgaaatactcagaccaaacaatagtattcccgagggttccagtttttgtaaataataggtcacctgcgtttaattcactttttttcaagaatctatatgtatcatctgtgacgtaattgagatcagttttatctaaaacaccattcttcaaatttttacccctaatcataggtattcctgcttcatttgtatatctgacattttttttcaatgattcaaaacttccatttgcagtataatctgttaattcatgtatcaactgcctattaggcaacacaggaatagttaaattcttaaatatcttatcaagactcactacaaagtccgtccgataaaaggttgcatctattctatcctctacatctgtccataaaatactgggctttatataatcatttaacattgataaccacctctaattaactccctttttataaacatcaacaatcttcaataaatcattccgatcattccccagctgaacttctattttatttttcacatcaaacccaatttcctctgccactgccatgaatacaggaccttgtttttcattttcatgttcttttttcttaatatatagaaaagatgtttttgctccggttcctgataattggaatgttactgtcgggagtgaaactacagccttaactatccccttacctccttcaaactcacctgttacttcattttttttacccattaaatattcccttacgtgtttgtaacctgagttactcaatatcccatctggtaagacgattattaattgtcccccatcctttaacaactgtaagttacggtcaataaacaaaactgcttggtctgtcgaacttacttctttccaaatcccttttggattaggttttgcacctaagcaaagaccctcttttttaggtttgcctgtttcgtcaattccctcgctatagcgttctaatatagctttcccctcatcagttttacttgaaactgatcctgatttaaaaggtgggtttgtaactattaaatcaaaactcttcggttttaatgattcagtcattaatgaatcatttacccagaaaattggcgcttttggtaatccatgcatcgccatatttaagcgtgcttttaataccatgtttcgtgtcttatctgctccaacaaagctatgttctttcataagttcaaaatgcttctccattttttctttcatcgttcccgtaaactgggtgagcatatatttttttactgcttcataaccttttattaagaatccaccggagccgcaagttatgtcacccattctaaatgtaggaatacctttttcatcagctgtgattaattttgatgcttcttttgggttagatgttaaatcatgcacaaccatttcaatcattgcttcagttacttgtctcggtgttaagtaagtagcttgaccaattttattatcatatttaccacgcatcaatacatcgaataaacgccctagaatatccgcactgacatttttcaatgtggctttcactcggtttccattttcatcttcaaaatcatctaattcctgaaacgtttcaaaagcagcaataaagttagcgggattttctaaacgaatgtattcatcttcactgaaaataaaacattcttcaccaagatcatttaccgcaacataatcctcatggttttttatttctttaaaagcatcacgaatttgcctaacagcctcttttccattctcttttatgtattgatactttaaaatatccaaaattcgcagacctgcattttctccttctcttaatacatagtctggatgatacaagcggaaagtctccataaaaagcaacttacttaattcatcaatggcttcgttcgtactgctgatattatcagcaccacccggtccatataagcgctcatgcaaatcatcaaatcgcttttgaagagtagagtacatctttcttgaccattcttcttgtttagaaatttgtcgtttttctttttttgttacatcaataacggccggtatttctgccagtggatctgactcaatacagtcagcgtaataattcacttcaccatttgatgcccaaatgaaatccggagcctcttcatgatactgcgcctctattaaagcagcatcttgcacttcaaaagataaatctgctcctttgtcaaatacctttacataaacaattttttcatcaccactagctaaaaaaatcgttgtgccatcttcttcatgtgtttctggtccagaaaatgtactataccccttcatcatgagttgttcttttaactcttcaattaatgcttgcattattagttcctccttattttcgtttcacgcgaataatattctctctcggtgattcataacgccctgtactaacagctacttcaataacctcattatgaggcacaatcatatcactcggtaactgttcaataatattggggtcaatcttagtcatcggccgtttttctaatgctttttcaattgctcctaatatggtatgacgacggtcatcaaccttaacagcccattgacctgattctgtttcatatatagagggatcaagcaagcaatataattttacttgttcctcattccaattcaatccatgttcttttgcaatgttcactaattgttctgttgtttttggtatggttaggtattcatgtaatatcaatctcatcacctgcctacacattttttgtacgaatattaataagttatattgataaaagcagagtatgaataatatcccattcaagtaatttagctaaaaacctaaattttttgcaagtaatgtcaattaaaaaacgaaacaagtgacattatctaatcagaaaaggtaacgagaatattatactaaacagatttgcatttttgtctattttaaactactgttacttacgatttgccatacaatctcattttgctcgttaaaatctggtacaggtaccattactttgaccaattcttaaagcctaataaacaaagtggtactaggtgatatataacactcgatctgactatcaacaatgtaagaaattaagtacaagtgataaatactcagaagttcaatttttaaaatctatgttaattttgactaaatgatcgtggaaaactattcctccaactcagaagttactaaagctcctgtccaactcgcccctattggttaagctttcacttaatcatttaattttttttgtctctctgtatccatttagccaaggtatatttgtatattttagagacttaacaccaattcgtttaatacagatccctgttgccgtgctaataattggttttgtccatattcttgtaaacgttcagtataaatattgaacttcctcctgtgacactaacacagcaaagatatcagatactaataccaaacgattatcctttattgaaacaataacagctggtatcttcccattatcaactaatgataggattaggtcaccttcgtttgctctatatctagccgcagacattctttcttattcattacctagctattaacaattaagtaaatatagcttattgtgttattattctttattcttcgctactgtataggataattgttatccattccaaaataccaggcgttcatatgcactataaatccatatattcatattattatcttcctttgcctctgtagacccttgaataataaactagagcctcctacttaggaaggctcttatttacttctgcatatcttatttgtctttcctcactagaagtgaacagcactccacatgattcgtatggggaaacatatccaccggctgcacttcgagcgtctgatacccgccatcctcaagcacccgcaggtctcttgcaagcgttcctggattgcaggacacgtacaccactcgcttcggtttcatgtcgatgattgtccgcaggagggcttcgtcgcagccttttcttggcgggtcgacaacgagggtgtcggccgtgatgccttcttcgtaccatttcggaatgacggtttctgcttctccgactgcgaattctgcgttcgtgatgccattcagctcagcgttgcgtttcgcatcctcgatggcttccggcacgatttcgacgccgtatactttcttcgcctgcttcgctaagaagagagaaatcgttccgatgccgcagtaggcgtcgatgacggtttcttccccttgaagctccgcgtactcaagcgctttgtcgtagagcacttttgtttgctctgggttgacctgatagaatgatctggcagagatggcgaatttgacgtctccgatgaggtcatagatgtattcttcgccccagatgacatttgtttcgttcccaaagatcacgtttgttttgtttgggttgatgttctgcacgatggatttcacgtgcgggaattgcgccgtaatgtcttcgatgatcttcgctttgtgcgggaaatcgcttgttcttgtgatgaagacgatcatcatttcgcccgtgacgacgccgtatctgaccataatgtgacggagccagcctttgtggcgttcttcgttgtaggctttgacgccgtatgctgcgcagatgtctttgacggcttggacggcttcgtcatttttggattgctggatcaggcaggcgctcatgtcgatgatgtcatggcttctttgctgatagaatccggcgacgagcccgccttctctttctccgacaggcacctgtgctttgtttctgtagttccacgggtcttccatgccgagcgtcgggtgcacggtgacattggacagatccagcttgccgatccgttctaagacgtctttgacttgtttctgtttaaacaagagctggccttcataggtcatgtgctgaagctggcagccgccgcattgcttgtaaatcgggcacggggcatccgttctgtgcgggctttcttctttcagttcaatcaagcggccgaaagcgaagccttttttgacgcgtgtcactttgatttgcgctttttcctcaggcagggcgttcggcacgaagatcgggaagccctgaacctttgcgacgcccgctccttcgtgcgtcaaatcctcaaatgtcacgtcatagtattcatttttttctatcgggggtttcattttcatctataatcacctctagttttaccaatagccttgtttcagcgtgctggcaaaccttcaaattcaatgtcagccttcaaaggtttccgatcacgctgaaaagatgacaaaatcctaaaacgaatactgttttaggattttgtccgcgtattaatcatccagctgttccgctttctctttcggcatgatgacgtgaatatgccggtacagattcacgaattcgcccggcagcatgccgccgtattcgccgtccaggttcagctgcatcttttctgatacattgactttcacacggttcgcttttgtgtaaataatgtgctgatcgttaatatgatcgcctctgagcgccatgctcgcgactctgataaactccgcgagattggcttttttcaaaataatcaaatcaaacatgccgtcattcaggctggaatcaggggccagcttctcgaatccgccgaccgagttggtcagcgtcactaaaaacagcataatttcgccttgaaacagcttgccgtcatattcaatctcgacttctgtcggtcgaagtgaaggcagcatttccattccctttaaataataagcaagctggccgagcatcgttttcagtttgcttggcacatcatacgtcagctccgtcagacggcctcctccggcgatgttgataaaatactgaccgttcacctgtccgatgtcgatcgggcgggccacaccgttaatgacggtatcagcggcattcagtatattctctctcggaatgcccagcgctctggcgaagtcatttgtcgtgccgaccggaatgatgccgagtgtcgggcgtttgtctaacggcgcaagaccgttgacgacttcattaatcgttccgtctccgccggcagcgataatcaggtcaaactcccgcaaagcggcttctgttgcggcgtgggtggcatcccccgcgcatgtggtggcatgggtggaggtttcataaccggcttgttcaaatttttgcaggacctgggcaagatttttcttaaaaagctcccgtcctgaagtcggattgtatattatgcgtgcacgtttcattatctcatcatcctacttaagagtatccgatccattattaacactaacaacctttaattatactatgacttgagaaaatcgcaacaatatgtacaggaattgccagaagaaaaaaggccccggctccgtttaaggagccaaggcccgctgtcttactcttcttccgttccaggttttttcttacggaatttcgctaatacttcatatacgatcggcacaatcagaagggtaagcagagtcgaactgattaaaccgccgataacggtgacaccgagtcctttagaaatgacctggctgccgccttcgaagcccaatgccaatggaagcagggcgccgattgtcgcgatcgccgtcatcagaatcggacgcaatctcgtagaacccgcctctaggagcgcttctctcgtcgataagccttccgcttctttatggatgacgcggtcaattaagacaatcgcgtttgtgacgacgattccgatcagcatcagcataccgatcatggcattcagactgatcgtctctccggatacatacaggccggctaatgcgccgatgactgtaaacggaagcgagaacagaatcgcaaacggcgctaatgctccgccgaacgtgatcacaagaacgaggtatacgatggcgattgcggcaagcatcgctaagccgagtttcgtaaaggaatcagcaatatccgctgatacaccgccggtatcaatggatacattgtccggcttatccagtttgtcaactttcttttgaacggctgatgacaccttcgtgacgttgtcagaagtgacggttgccgttacgtcagcgtacactttgccgtcgcgtttggaaatggtatcggatgtcgtgccatttttcactttcgccacatcgccgattttaacttcttggcctgcaggcgatgtgatggttttatcctctaattcttttacactcttatactggtctttttctgttttgatgttgacgtcaagctctttgccgtcttttttcaccgttgtcaaaggagactgtgacgtttgggacatcagggcttgggagatttgcgaagccgtcaggccctgcttgctgagtttctcctggtcagcggtgaacgtgtactcatcatatgtgctggaaaggcctgagttgacgtctttcagatccttctgctttttcatgatgccttcgatgtctttgaccgtgcctttaatatcagactctgaatctccgtacacatagtacgttaattcgttgttgttgcctgacgagctgaaattttgtgatttccattcgccgcggctggatgtttttttgatttcttttaagacattgtctttttctttgtcaaaatcaggcgtgtcatcctcgtatttcacgtagaacaatgcgccgtttgagcttccgccgagcggactttgcgaacctaaagaatactgaacggtatcgacatgtttgcgtttaagcagcatgtcttccgctttttgcgcagctttttcagcttcgcttttcgtttcgcccggttcaggcgtatatgtgagctgcatcgttttgtccgcttgcgcaggcaggtagctcgcgccgatcagaggtacgaggaacaaactgccgacaagcatcagaaccgcgatgatagatgtaatccatttatgtcttaatgaccaattcagcacttttttatagaaattggccaatctgcccggcttatgctctttcgctttaacaggcgcgcctgtgagcgattttttgaataagctgtgcgcaagcatcggcaccagtgtgatcgaaatcaacagcgatgcggcaagcgcgaagacgattgttaatgcaaacggcataaacagttcgccaatctgtccgccgaccatggcaagcggcaggaatacggcaatggttacgatcgttgatgacatgatcggtttaaacatttctttcgtcgcttcacgcaccaattgcttcccgcgtaaaggttcatctttcagcctcatgcggcggtaaatgttttcgatcacgacaatcgagtcgtcgactacccgtccgatggcgaccgtcatcgcaccgagcgtcattatgttcaatgtgacatcaagctgattcagcacaagaagcgcaatcagcagtgacagcgggatggaaatgatagaaatcatcgttgatttaatatctcttaagaataagagaatgatcacgaccgcaaaaatcgcgccgaaaatcgctttgcttaacatcgtatccaccgactctgtaatcggctctgccatatcaagagtcgagctgtacttgaaccctttatggtcttttttgtattgattcagttcatctttaatcgcatcggccacttctaccgtgttggcgtcattggcttttacgatattaattccgatgctgtcctttccgttcgtgcgggaaatggattcagcttttttcacatctttaatgtcggcaatgtcagaaagcttgactgtcggcacccctgctgccgcgctttgctgtgcctgctgcatagcctgagcgtccgccgcagatgccgcaccggctccgcccgcttgaccttgagcggcagaagaagatgtgaccggaattctcatatctttcagatctttaattgacgtaatatttccgttaacgacaactgatttttctttgttgccgaatgtgtacaatccaagcggcgtattgacgtcagagccttggatcactttcttgacggtatcttcatcaagtccgtactctttcatttttttgtctttgaaagagaattccacctgctcttcctgctgtccggaaacttgcacagacgcaacgccctgaatgccttcaagcttaggaacgagagtgttttccacatttttggtcaggtcttcaagcgagcttttgccgcttgtcacactgagcgtcaaaatcgggaaagagttgaggctgtaacgggaaatgtcaggttttttcgcgtcgtcaggaaggctgacactgtccagcgcttcagcgacttcggttttcgccttgtccatatccttgctgtaatcatattcaatcataaccgatgagacgttttcagaggatgtggacgttacgacgctcactccttctaaattctggaccgcctgctcgatcggttttgtcacgtcatccgcaacttgactcggagcagctccgggataagtcgtatttactgaaaggtaaggcatgttgacgtccggtatagattcctgcttcatattcataccggcatacagccctgctacagtaacgataatcgtcatcagccaaactgcgaatttgttcttcagtacaaagttaataatgtggttcatcatgtcctccgttaatttttattgactgactggtcattctatataatactaaacggtataactcaacatcgtcaactaataaggcagtaaatttttctaaatttttcaggattaaggggaagcacgtcatgaacgaaaaaaaagagaaaatcataaaaacaggcatccatttatttgccaaaaaagggttttcttcaacaaccattcaggaaatcgccggtgaatgcggaatttcaaaaggagccttctatctccatttcaaatcaaaagaagaccttttgctgtcagcatgtgagtattacatcggcatgtctatggaagaaataaagaaaatcaaaacagaacatcagcataaaccgcctaaggacgtattccgaaaacaaatcgcttatcaattccaggaattcatggagcacaaggactttatcattctcttgctgagcgaaaaggtcattcctgaaaatcaaaaggtcaaacagtattttcatgaggccaatattcaatttaacatgctgtatcgggatgcgttgctctccgtttacggagatgccgtcacaccgtttttagcggatgcgtccgttatggcgcaaggaattgtgagctcctatattcatttcttgatttttaatgaacatacggcattccggacggaaaacgtggcggcctttctgattgccagaatcgatgatctgattacgggactgataaaagacaaccccgatccgctgctgcctgaggatatcttcactcagcccgcggcggacagagaaagactgcttgcggatattcaaaagataaaagcacagcaggggctgcctgaggacgtcctcgtatcgcttgaagtcattgaagaggaatgcgcaaaggaagagccgcgaaaaccgattattaaaggaatgctgtccaacttggcaggcagcggaactgaacagattgaaacgctgcgggcttccattgaaacctatttcagcttataaaaaaaagagaccggcgcttaccggtctccgtgtcagcagcgcccttagaggcggctgctttttttttatcgttttttgatttcttcaagtaagatcttgttgaccatcggcgggttggcctgtccttttgaggctttcataatctgcccgacaaggaagccgatcgcacggtcttttccgtttttgaagtcttcaattgactgcgggttgctgtcaagcgcatctgttaccagcttcagaagcacgctttcgtcagaaatctgcacgaggcctttttctttgacgattttttctgcatcgccgcctttttcaattaattctttaaagactttcttcgcgattttggacgagatggttcctttttcaatcagcttaatcatgccggcaaggccttcaggagtcagggcgacatcctcaagctctttttgttcggcgttcaggtaagctgagacttcacccatcagccagtttgatgcctgcttggcttctgcgcctttattgaccgtttcttcgaagaaatcagccatttctttcgtcagcgtcagaaccattgcgtcataagcaggcagaccgagctcttcgatataacgcttgcggcgctcgtccggaagctcaggaatggttgctcttacgcgttctttccattcgtcatcaatgtagagctcgacaaggtcaggctcagggaaataacgatagtcgtcagaaccttctttgacacgcatcaaaatggtttttttcgtcgcttcatcatagcggcgcgtctcctgctgaatgactccgcctgacagaagcacctgctcttggcgtttttcttcatgctcaagtcctttttgcacgaacgcgaaggagttcaggttcttcagctccgtttttgtgccgaatttctcctggccgatcggacggagggaaatgttggcgtcacaacgcagtgaaccttcttccattttacagtcggaaacgcctgtgtattggataattgatttcagcttttcgagatatgcgtaagcttcctccggtgtgcggatatccggctcagatacaatctcgacaagcggcgtgccctggcggttgaagtcaacgagggaatagccgtcgcccgtatgcgtcagttttcccgcatcttcttcaaggtgaagacgggtaatgccgatttttttcgtttttccgccgacttcgatttcgatccagccgttttcgccgatcggcttgtcaaattgagaaatttgatatgccttcgggttgtccgggtagaaatagtttttccggtcaaacttcgtatccgttgcgatttcgcagttcaaagccattgcggctttcatcgcgaattcgaccgcttctttgttcaaaacgggcagcacgccgggatagccgaggtcgatgacgctcgtttgggtattcgcttccgcgccgaatggcgtcggtgagcttgagaaaattttagattttgtttttaattccacatggacttcaagtccgattaccgtttcaaagttcacttcatttcaccccttacagttcaggtttcgctttatgatgatctgttgcctgctcaaaagcatgagcgacgcggtatacagtgccttcatcgaagtgttttccgatgatttgcagtccgagcggcagtccgtccgcaaatccgcacggcacgctgattcccggcacacccgcgaggttgacaggaatcgttaaaatatcgttggcgtacattgtgagcggatcgctggttttttcgccgattttgaatgccggtgtcggcgttgtcggtccgacgatgacatcgtatttctcaaatacgtcttcaaaatctttcttaataagcgtgcgcactttttgcgcttttttgtaatacgcgtcatagtagccggagctgagcgcgaaggtgccgagcatgatgcggcgcttcacttcattgccgaagccttctgagcgtgtctgtttataaaggtcgatcaggttgtccgcattgtctgagcggtagccgtagcggatgccgtcaaagcgcgcaaggtttgcagacgcttcggaagaagacagcagataatacgtcgcaagcgcgtatttgctgtgcggcagagatacttcttcccatgtcgctccgaggtcttcaagcacttttaaagcggctaaaaccgattctttcgcttctttgccgacgccttctccgagatattctttcggtacggcgatttttaagcctttaatatcgccagttaatgaagaaagaaagtccggcacttcgacattggcgctcgtagagtccattttgtccgggcctgaaatcgcctgaagcaggaatgcgttatcttctacgtttcttgtgatcggtccgatctggtctaatgaagacgcaaaagcgaccaaaccgtaacgtgacacgcgtccgtatgtaggctttaatccgacgactccgcagaaagaagccggctggcggatggagccgcccgtatcagatccgagtgaaaacggcacttcgcccgcggcaaccgcagctgcggaaccgccgcttgatccgccgggaaccgtatcgagattccaagggtttttcgtcgctttgtacgcggagttttcagtagaagaacccatcgcgaactcatccatattcagctttccgatcgtgacggcttcagcagcttgaaggcgctccacgaccgtcgcatcgtaaatcggatcgaagttttcgaggattttgcttgagcatgttgtgcgaagccctttggtcacgatgttgtctttgacgccgatcggcattccgaagagaagaccgtgttcagaccgtccgtcaaccgcttcgtcaagttctttcgcgtaagcgcgggctctttcttcatcaagctgtaaaaacgcctgcaccttatcatccacggatgcgatccgtttgtaagattcatcgacaagatcggaaatcttgatttcttttttatgtatcatttgtttcagttctgtgattttgtgatcaaataatgacatactgtctccctcctttaatccagaatagatggcacacggacatagccgtctttatgatcgggagcatttttcatgacatcctcgaccggaaggcctttacccgcttcatcttctctcattacgtttttcattttcagcacgtgtgttgtcggttccacgttatccgtgtccacttcattaagctcctcggcaaacgagataatgctgtcaagctgttctgtgaacatttcagcttcttcatccgtaatggcgagtctcgccaaatgagcgacatgctttacttcttctatagaaattcgtgacataagatccacctccgcataattctccgtttcgtcatataatactgatcatatcaaaaacgagccctctaaagcaacaaaacgccgccttctgaggcatgatgaaaccctctctattttatcctaaatcggggagaaagagaaacgaattatatgtcagaaaatttttacttttataacttattggtagcgttttcatctctaagctgttctatgttggcggggattttttccttgagcgggccaggtttcgagagttgattgatcggggatactttgttaggtttagtaaccatagccagcactaaatcatgcgatccgcatggaatgatgactaaaggctggatcgccggcgcatattccggcactactaatctacagaggtgatgcaacatttacatgaaagaagagagggaccaaaaacgtgagtattgaactaattatatctcttggcatttactttgctgccatgctgttaatcggctggtacgcattcaggaagacaacgaatattaatgattacatgctgggcggaagaggactcggcccgttcgtaacggcgctgtccgcaggtgcggccgatatgagcgcatggatgctgatgggagttcccggcgcaatgttcgcaacggggttatcgaccttatggctggcgctcggtttgacgatcggcgcgtattcaaattatctgctgcttgctccgaggctgcgcgcttacacggaagttgcggatgatgcgattacgattcccgattttttcgataaacggttccgccactcgtcatcattgctgaaaattgtttccgccgtgattattatgatctttttcacactgtacacatcgtccgggatggtatccggaggcaggttatttgaatcggcattcggcgccgactacaaattcggtttgtttttaacggccggtgttgttgtgctttacacgctgtttggcggtttcctcgctgtcagtctgactgactttgtgcagggagcgatcatgtttgcggcattagtgcttgtgccgatcgttgcttttacccagctcgggagcgtttcaacgacgattgattcgatcaacgccgttaacccgaaactattggatatctttaaaggcgcgagcgtcattagcattatttcttatttggcatggggactcggctattacggccagcctcatatcatcgtacgatttatggcgattaaagaagtgaaagatttaaaacccgcccgcagaatcgggatgagctggatggccatttcagttgtcggttcattgcttaccgggattatcggggttgcgtattctcatcacttcggagtctccgtaaaagatccggaaacgattttcattattttttctaaaatcctgttccacccgctgattacgggcttcttgctgtccgcgattttagcggcgatcatgagttccatttcctcacagcttctcgtaacggcaagcgccattacggaagatttataccgcgcctttttcagacgggaagcgagtgataaagaattggtcatgaccggacgcctgtcggtattgatcgtggccgttatcgccatcctgctttccatgaatccgaacagcaccattcttgatctggtcggatatgcgtgggcaggcttcggttcggctatcggcccggcgctcttgctcagtctgtactggaaacggatgaatgaatggggagcgcttgcggcgatgattaccggggccgcggccgttttaatctggatcaccacagggcttgccgcttcaaccggcgtatacgaaatcattccggggttcttcctcagtctgattgccggtattgccgtcagcctgctgaccaaaaaaccggccgatgcttcttatcagctgttcagccggatggaagctcttttgaaaaacaagaaatagacacaaagccgtcagattttatccctgacggcttttttcttccgcacttgtcctgctataaatactgtgagaaaatcatatcaatttattataagaaaaattgcggaggtgctgtgcaaattgagctggcctatcgaaccagacattttattaaagctgggcattgccacgctgatcggcatgattatcggtcttgaacgcgagctgaaaaacaaaccgctcggactgaaaacctgtatcgtcatcgccgtcagctcctgtatgctgacgatcgtcagcattaacgcggcatatcatttcccaaaatattaccgtatcatgatggatccgctccgcctccccgcccaaatcatttccggcgtcggttttatcggcgcgggcgtgatcctgcgtaaaagcaatgacgtcatatccggcctgacgacatcggccatcatctggggcgcagccgggctcggtctggctacaggcgccggcttttataaagaggcgttcgcaagcctcttgtttatcctgatcagtgtcgaatttcttccgtggctgatcagaaaaatcggtcccaaccgcttgaaggaaaaggatatccgcgtgagaatgtctctttccgataaagacaaaatgaccgagattctaaaagaaatgaaaagcaaacggctccgcattcactccgtccggattgatgatctgcgcgaaaaagaatttccgattatggaagtgaaagtcagtgttcacaaaaaccgctacaccactgacgtctattatgatattaaagaaattcagggtgtcgtcggagtgaagtgtgatacgttataaaaaaacgccgggctggattcagccggcgtttttctatttatacgaatgcagaaaagtgatactccgtaatcggggtttcgttttcgatatcgcgcctgaaggctttcagcatctcaagttcctcgtccccgagtgaattgaggtcaaacgcctgatgcaataatccgtagatcagcatatggcgcagccggagaaaatccgggatgtgttcaagccaggcggggtcaaggtcattttcttccctgtagcctttcataaagggtgtcatgaactcacccgtaaacgcggccttgtcttcatacgggatgaccggataccacaacatgttgtacagcagaatactgatatcattcacaaaccaattgtagccgctatcatcaaaatcaaatgcagtgatttttccgttgtcccaattgaaattgccatgatgcagatcggcgtgcacaaggccgtagttttcaggattcttcggcaaacggcgcagtttttccattagagcatccgcccgctcaaatacgagatgctgatctgcgggcacatattttctcagcttcagctgctcctcttcatcccattcctgccttttatatgccgggtcgctcagacggtagctttttgtcagccggtgcatgttccccgtgtactttccaagctcataaaacagagttccgttccagtctgattcctccactttgcgtccgggcgctttttcatagactcttactaaaaacgctccgccttttccatccggcacttcttcgacatctctgccatttaatgaaggaatcggctttgctgctgaaagccctccctttgccagatgatgaagccattccatttctccgagaatatattccggtgttcttctgatcgtatgcgtaatttttaagatatacggttcgttatctttcacaatttcgtatacgtagttctctgcgtccgcaataaattgaaacttggtaaagccgtatatttcaccggcctcagccagtaccttatcttccttaaaaatcgctttaatatctttatgcatgctgattcacccttttcataacgtttgtaggcggtgtgtgtactcagcaaatgtcattcatcaacattcctgcccttctttcttcacagcagattcgtaacatccgcttagaaataaaatatgttttcctgttaattcctaattatacaaatatcttaacatacctcatccctctctccaacgatattcacaataaaaaaacccttgctcatacagaaatgaacaagggcatcttggttaatcgtaaatatggacggtcggttctttgtcacccgcattgcggacgatcagcgcttcctggccgtcagacgaggtaatgttaatctcgacatcaactgagccttttgaataataatccatcagctcacctgttaagtattgggtaaaggcgatgacttcgcttttcccgtaaaattgcatcgggatttcaatcttcatttttctcatttcatcgttttcgtacattgccgttccgacgactccggtgtaattcgggaagtagctgtcgatggcgtttttgaagcgtttaaatacttcggaatcatcagggtatttctttgccgtgtctgtatccgccggatagaagacgtacttttctttgacatcatcccagtttgaaatggtggatgagccggccttgacttctgtcttcgcaatgtaattccccggtacgattgatgttttcggcgcttgtttataaagggcgacggtaatcggcacatttttcaggttatccattttccgaaggcggttaacgacttcctgggcgatttcttcaccgtggctgcggatcgttttatcgctgagctccacttcctgctgcggatcacctgtgttttcgcggtaatagtatacagagttgagagcgagaccgatcatgacaccgccaagctggatggaatttttatcttttcttactaagtaatcctgctcaagcatggacgctaagtaaatcgggctgttttcatttttctcttttgccgatcccgagcttggcagcacagggtttaagccgagattctgaaaattggcgtctgcctttttcgcctttttcagatcactgccctcttttttgcggtcaagccagctaagtaccgtgtcctcatctaaatactggccttcctgatacaaatagtcatccgtcgggaacgtgtcttgagcgagccgcatcagacccgtctcgaattcatcgatgtccagcctcgtgttcagccggtccgcggtcaggccgcgcgcttttccggccttaaacggaagcaccattttatagtaggaatcagagatattatatttcggtatgatcgctttttcagaagactttgccgttttctgcgtgatctcttcctctttgttccccccgaaactcggcgaacaagccgacagcatgagtactgccgccgttgccgtcgccgccaatgccaacatctttttcaatagaaaacactcctcttatttctttagctctcccaatagctgtgcttcattccatacttcaatgtttaattcctgcgcttttgtcagcttgcttccggccgcttctccggcaatcagcaagtctgtttttttgctgacagatcccgtcagctttccgccgagcgcttcaatctgcgccttggcttcatttctggacagctcttcaagctttccggttaacacgatggttttgccggcaaaataagagtcgctgtccgccgcttttacttttttcgggcctttgtagagtgtgttcacaccgagttcctcaagttcattcaaaagctcaagcatttcttctttgcggaaataggtgacaacggcatcggccattttttcgccgatttcatctaccgcaagcagctcttcttccgtggcttgtttcagattttccaggctttcaaaatgcatggcgagtgttttggccgcttttgagccgataaaacggatgccgagaccgaacagcaggcgttccagcgaattctcttttgacttttggatggagctgatcagattgtcagttgatttttcccccatccgctcaagccggataacctgttctttcgtcagcttatacaaatcagcgacattacggacgagatgttcacggaaaagctgtgtgataacacgttctccgagtccgtcaatattcatcgcgttgcgtgagacaaagtgaatcaggccttctctgatctgcgccggacattccggattgatgcagcgcagcgcgacttccccttcaatgcggacaagttcgctttcgcactcagggcagctggtcggcatattgaattctttttcttccccggtccgctgttcgattaagacattgacgacctcagggatgatgtcgcccgcttttttgacgaccactttatcgagaatgcggatatccttctctttaattaaatcttcgttatgaagggatgctcttgagaccgtcgtccccgcgacttttaccggttccagaacggcggtcggcgtaatgacgcccgttcttccgacattcagttcgatatcgagaagttttgttacgacctcttccgccgggaatttataagcaatcgcccagcgcgggctttttgccgtatacccgagctcttcctgctggtcgagcgaatcgactttgatgacgattccgtcaatttcatacgggagatcggcccgcttcgcctgcagctcttcgatcatttcaatgacttcatctatcgtggcgcattttttccgttcctggtttgttttaaaaccgagctcatccagaaaatccaggccctgactctgtgtttccacacccatctcgtcaagctccgctatactgtagacgaagatgtcaagatttcgtttcgctgcaattttcggatcaagctgtctgagtgagcccgcagccgcgttccggggattggcgaacggctcctcttcatgtttcagccgttcttcattgagcgcttcaaatgactgtttcggcatgtacgcctctccgcgcacttctatggaaaggttccgtttcattttcagcggaatgttgcggatcgtttttaagttttccgtgatatcttcgcccgtcgttccgtctcctcttgtcgcgcctctgacgaaatagccgtcttcataacggagagaaacagcaagaccgtctattttcagctccacattataagcgacgccgtcaccgacagcctgacggacgcggcggtcaaaatcgcggagatcatcatcgttaaatgcgttgccgagactgagcatcggcgtgccgtgctgcaccttttgaaacgattcaagcactgctcccccgacccgctgtgtgggcgaatcaggcgttctgagctccgggtgctcttcctctatggcaatcagctcctgcatcagtctgtcgtactcggaatccggcacgctcggttcatctaaggtgtaatattcataactgtactgatcgatggtgcggcgcaattcttctgcccggtgtttcgctgtttctttgtccatcatgttcttcctttcctcttcaggttactgcttttcaatcggcgcaaaagcggcaagcagacgcttcacgccgactgggctcgggaatgcgatatcaagctcggtgctttcgccttctccttttacgctgacaaccgttccggtgccccattttttatggcccgctttatcgccgaccgcccagctgagcgagtcgccgcctgttttgttcgcataggaaacgggacgggatacgggcccgcgtttcggctgcacttttcttcccggctgcatgcgaggtgttttcttctcatttaggttctccaataaatcgccaggtatttccctgataaagcgggattccggattcatattggtgcggccgaataaggtgcgcattttggcatttgttaaatacagttcttcttccgccctcgtaatgcctacatatgcgagcctgcgttcttcttccatctcggcttcttccatcagggagcggctgtgcgggaacacgccttcttccatgcccattaagaacacgacaggaaattcaagccccttagcggcgtgcagtgtcattaaagtgacggcattctttccgcctgattcctcttccttctggtcaagctggtcaatatccgcaatcagcgccaaatcagtcagaaacgcgacgagagacttgtcttcgcttttttgttcgaagtttttcgtcacggaaagaaactcgtcgatattttcaaggcggctttgggcttcgattgatttttcggccttcagcatttctctgtattccgttttctcgagaatttcttccgtgagttccgtaatggacaggtagtcctgcatattcgtcagattttcaatcatcgcgccaaagccgtcaagcgcgtttgccgcttttgcactgacgccgatgaaatcaacctgtttgaccgcctggaacattgacattccgttcatcgccgcatatgaagcgattttttctagtgaagtggcgccgacgccccgcttcggcacattgacgatccgcgtaaaactgatgtcgtcgtccgggtttgacacaaggcgcaggtatgcgagaatgtctttaatttctttcctgtcgtagaacttggttccgccgacgatattgtagttcagtccggattttaaaagggtttcttcaatgacgcgcgactgggcgtttgtccgatataaaatcgcgatatcggaaagcttccgccggcccgagctgtgcagctcataaattttgcctgcgacgaattggccttcgccgaattcattgtctccgctgtaataagaaagcttgatgccttcgtcattttccgtccacaggtttttcggcttgcggtttgagttgtttttgatcacttcgttagccgcctgcagaatccgctttgttgagcggtagttttgttctagcagaatcacgtttgcgctcgggtaatctttttcaaaggaaaggatattcgcgatatccgccccgcgccatctgtaaatggactggtcggagtcaccgacgacgcagatattttcaagacgggccgcaagctgcttcacaagcaggtattgcgccctgttcgtatcctgatactcgtctacgtgaatgtactggaatttgcgctgataaaactcaagcacttccggcacacgctcgaaaagcttaatcgtcgtcatgattaaatcatcaaaatcgagcgattggtttttcagcagttttttctgataatcggtatacacgtcactcgtgacctgatcgtagtagccgccggccgtttttgcgaattcctcaggttcgatcagctcgttttttgcgctgctgatggagcctaaaatacttctcggatcaaactttttcggatcgatattccgctctttcagaatccctttaataacggaaagctgatcagccgtatcaagaatggagaaatttcggttgatgccgattctgtcaatatccctgcggagaatccgcacgcacatgctgtggaaggtggaaatccagatttcatccgcgccgggtccgagaatgctctccacccgctccttcatttctctggctgctttatttgtaaatgtaatcgccagaatgttccatggcgccacgtgtttttccgccattaagtatgcgattctgtgcgtcagcacacgtgtttttccgcttcccgcgcccgccatcagaagcagcggaccgtccgtcgtcttgaccgcttcctgctgaacgggatttaatccgcttaataattgattgctaatgtaattcatatccgttcaccgcctatcaaacatatgttctatcataaatcaatttcgtccgcttggctactttgtctttacagccgccaccgttttgagcgcctgatcaaaatcttcatatacggcatttccgacaacgatgacatcggcatgacggccgaaccgttccgccgtttccgcgtctttaatgccgcctccgtaaaacaggacggacttgtccagcacagctttcgttttctccaccgtttctatgtccgccagcatcccgctgtattccagataaaaaatcgggagatgaagcaaatgttccgcgacccgcgcataggcgagaatatcttctgtttctatatgtgtatccgcctccgtcaaagcggccgccttacaatcagggttgacgatgcagtagccctccgtcacgatttcctccattgacatgagctctccgtattctttcatcgcctgatgatgcatgccgacaatccagtccgcctttttgctgttgagcacactcggaatgaaataaagatcaaacccgggcacaatggaatcaatcgtcgacacctcaagtacgcacggcactaaaaaccgccgcacctttgacatcagtctcagcacattgtcctcggtgatattgtcgcttcctccgatcacaatggcgtcagtccctgattcacaaagccgttccagctgttcatccggtaaatctttattcggatcgagtttaaaaacatgcttccactcgttaacatcgtacatgcgttttcgttcctccattcgtttcttgccatttaaacattataacaaattcgtttggcccggaaaaacggaaaaagacgtcattcacctgattcacaaaaaaagattgcgctccgccggacgggaaacggctatgtttgaaaacagacaatatgtggaatgtcaaagagaaaaaagacaaggagtctgatctcaatggaacaagccattatcgtactgatttgtatattgatttttattattttagttcccgccgtattgtttctctggatatacataagagacgaaaagcaggaagaacattcagtgctgcgcaattatcccgtagcgggaaaactgcgctatatatttgaaaaaatcggacctgagctgcggcagtatttattcagcaatgataacgaagaacagccgttttcccggagagaatatgaacagacggtcatgtcgggaaagtataaaagcagaatgatgggcttcggctcagaacgggatttcgatcagccgggctattatatccgtaacgccctcttcccgaaacaaagggaggagctgcgcgcagatcagacgccgaagatcgacacgatggtatacaaaattgacaaagacaacctgctgaaacgcagcgaacaccgcgaaaaagcaaaggcggacccttattacctgcatccggacgatgtgcaagtgatcggccgcgacacatgcaagaagccgttttatgtgaaagggttaatcggacaatcagcgatgagctacggctcacttggcgaccgggcaattaccgccctgtcaaaagggctgcaccaggccggcggcacatggatgaatacaggcgaaggcggcctgtctgagtatcacctgaaaggcggcgcggatattatctgccaaatcggccccgggctgttcggcgtccgcactgaagatggagaattttcatgggaagaatttaagaaaaaaagccgcctcgaacagattaaagcctttgaattaaagcttgcgcaaggggcgaaagcaagaggcgggcatattgacggttcaaaggtgaccgaagaaattgccgccatcagaaatgtgcagcccggacaatccattgacagcccaaaccgcttcaacgagttctcaaatgttccggacatgcttgatttcattgagaaattaaggactgtcggcgaaaaaccggtcggcatcaaaattgtcccgggcagccgcaaagaccttgaagaccttatttcctgtatgagttcatctggcaaacttcccgactttattacgattgacggcagtgaagggggaacgggagcttctttccatgagctggcggattccgtcggcctgccgattctgaccggcctcccccttgttgacggccttttgaagacatacggtataagagataagctgaaaattttcgcatccggaaagctgctcactccggataagattgccgttgccctcgcgttaggggcggattttgtcaatattgcccggggaatgatgttttcagtcggctgtatccgcgctcaagtatgccacaccaatcattgtcctgtcggagtggcgacaaccgacccaaaacttcagcgcgcgctcagtatcgaggataaacagcaccgcgtctgcaactacgtgctctcgttgcgtgaagggctgtttcacctcgccgcggcggcgggcatcagctcgccgattcatttctcagctgaacacatcgtataccgggaggaagacggaagcctgagggaacttcccggccttttgaatcagcacgcataaaaaaaaccgcctgccgtcatcggcagagcggttttttacgtagctgaggaggattctccttcgtttacgcggtcaagcgccatttcataggcgtcgttaccgtaatttaagcatctcttcacccgggaaatcgtcgctgtggaagcacccgtttcgctttcaattttgtgatacgtatttccttcgcggagcattcttgccacttccaaacgctgcgccagcgattggatttcattaatcgtacaaagatcatcaaagaaacgatagcattcctccagatctttcagcgataaaatagataaaaataactggtccagttcttttccgcgtaatttatcgatttgcatcgtcaaacaccttctcctttactaatggaagctgcatcgagatcaggcacgatattaatccatgtctttcctggcacaaacggaagaatctcaccgccttttacgggcagaatacggccgtctttatattcccagtctgactccataacatcgccgtgctgaagcaggaggcccttcccccctgactgaatatcgatggcccgccttccatctttgtctgtcatgcgatggccggcttcaacaataaaaatattgtgcatggctaaaggctttccggtctcccggtctgtcgctttcacaccatcagagcttcttgtataagtatcagcttttttatcataatcgtattcgacaagatttgtaacgttttgtgttccataatctatccgaatattgtaggtttcgtttccgggttttgcatctgatgtctgaaatgggagcggttctgtttttccgttcagcttgtatcctttttgttccgccgccttcctgatattgtcatacgacgtgtaggaattgtggggcggcttgctgaaatcggctctccaaaacaggcttccgtcaaaatccaaaccgtttatataatcgtaagctccggactccagctgcttttttgcgccgggactccagccatgatggacaaatatgctgttaaacccgctgctgagcgtgacgaaatattccctcgcgctccgcacaggcccgaccgtttccggcatctcactttgaaaaatcgcgagaaaccgcgtaatccggccctccgcgagcgcttcgatgacaacatccgcctttgacagcccggattggggcctcgccttcggatgattgttcactgcgactgcaatcggacggcgttctgcaagcttctgctcagttttcagccccgttaaaggagcttccgcttctttcggctgcacctgatcggcattgttctgccggcaggcggcaagcagcaaaaacgcaaaacaaagcatacaaacggttttccatcttttcatatgtcggctccctgcttttatattttaacgcattatcgatggaaagagtacagtttttttcatcacgtcgaatattcctctcggcgtaatgcggatataaggcaggtgtgtgctctgcaaaaagagcagcgtatagatcggatcgcagaatcggtagccccgctcctccagcagcgtcctcagtttttgctctttctcaagcacttcttcatacttctccgcagatgcagaaccgtttaaggcgaggggaatctcatgaagaatcttcccgttttcggcaagcacgattccgccgccgatttctttcatccgtgagaaagcgagcaggatatcttccttattttttccgacagcgataatatctccggttgtcgtgtaggaactgacaaagccctgcacccgatcggcaaaacctttcagcattgtattgacccgccattttccatgcttatcgagaagcgtgagatagcattcatcatgatcaaaagaaagctggtcaacagaattatcaatcgcaatcatatacggctccataatgaccgcgttgcgcatggtcacacccatcggcattgaaaactgtaaatcatccatcgtcatatcatatgaaagctcgagagggacaagaccgccctttttccaatccgtttctgtaaacgcattcatatttcggccgtcttccctcagcaggatgcctttggagatcaccgtgaccgggtccggattcatcgggtcatcgagaatgttcaatgaagcaagccggcccggaccgaccacaccgagaaagtcgtccatctgataatacttcgcgatattaaaggaggccatattataggcatcgatcgccggaactccttcctccaaagcgattttgatcaattcattcgtcatgccgcctttataaaaatgcggcgtcgctccatccgtcgtgtagaagaaatgatcataatgccggaagcctttttgatggagatcctgcaaaatcgttctcaaatcagggcggatggatgaatgtctgagcgaaacatagtagcccaattcaagccgtctcatcacctcgccgccattcatcgcctcgtggtcggaatccgctccgaacagtttcatcttcgtcagtgttttttcagaggctccgggaaaatgcccttctatccgcttgcgcagtttctttgtcgcctgcatgcaatgaagcatcaagtcatcgccgtccatgaggcgcggccatccggtcaattctccgccttgaatgacatccgggtgctccatccattgcttgcggacatcaaaagaaagaagctgatcctcattcagcacttcagtctgcagatcatatctggaccaccagaaatattgcaccggctgttttttcagttcctccaatatagtaagcgctttctttttaccgctgtgcaaaagaaaaaacaagttatcattaacaaacgtcgttgttccgaattgagacacatattcggcgagcgtttggggattatatatttgaaaaggatgtgtatgcggttcaatgtaacctggcacaatgtattttccttcacaatttatggtatgaatgttctctgctgcatcaggaagctcatgaccaacatatacaattcggtctccataaatccagacattctttttcagccattgttttaaaaaaggatttaatacgagagcatcccgtaaaagtagcgttggaagcagctttgagtctacaacatccgcctgtgatctgatgtctttatttttccagttaaaggtacgttcggacattcacatactctccttcgcttatattagacccatcgtatcacatccgcacaattatcgcacggctaaaacgttacaaattattgaagatgaatgaaaaactttttctaagggagctgaaatgatgaaaccgaatatcagtttattaaatgccgttatgcgcatcacttgcggcctcaccattttgtctgctgcgtcagcgaaatacacgagaaaaccttggtgcaagatgcatctcttctgtatgatgatgggcgcgatgaaagcggcgtccggcatcctccgcttctgtccggtgacatatatgttccaaaccggaatgaatcaggatgacagccatcagcaagaaaaataacaagccgtttcggcttgttatttattttctcctgtcccgcgagtctgagaagaatccgtctatacgccggaagacttcatcgatgactgcgtgtcacacggcaaaccgacagtcttagtcgtcttttcagaagaaaacccgcatcttatatgacacggggttttcctctttatcgctgagaagctttcagcgcacgggcgccgatgtcgcttctgtaaaacagtccgggttttgtcagccctgaaacggcgctgtacactttatctctcgccgcttcaaatgtctcagcaaatgccgtgacattggcgacccggccgccgtttgtaacaaattgtccgccgtcttttttcgttccggcatgaaaaacggcgatcccgtcttcagcggacgtcaaactgccgatcggcgtgcctttcgcatagccttccggatagccctcagaagccagtacaacgctgacagcggccgtatccttccaccttaggtcaacatccttctcctgcagcagatctaagagcacctggatgaggtcagattccattctcggcacgactacctgtgtttccggatctccgaagcgcgcgttgaattcaatgacttttgatccgttttccgtcagaatcagccccgcgtacagcacgcccgtgaaggaacgtccctcttttaccattgcttttgccgccggcttcacaatcgtttcgactgcgcttttgacgatatcatcggaaatgtgcggcaccggtgagtaggcgcccattccgcccgtattcggccctttgtctccatcgaaggcgcgtttatgatcttgagcgattaccatcggatagacggtctccccttttacaaacgccattaaggaaaattcttcgccggcgaggaactcttcaatgacaacggatgcgctcgcctcgccgaatttctcatcctcaagaaaatcgtgcaggcattcaatcgcctcttcttccgtcatcgcgaccgtgacaccttttccggcggcaagtccgtccgctttaatgacaatcggcgcacctttttgctgcacatatgctttcgcctcttcaaatgaagtaaacgtctcatactccgccgtcggaatgccgtattttttcattaaatccttggcaaactgtttgctcccttcaatgattgccgctttttcagacggtccgaaaacaagcagtccggctttttcaaactcgtcggctatcccttcaatcagaggaacttcggggccgataatcgtcagcccgacatgatgttctttcgcaaacgcaatgagtgcggcatgatcgctttcttcaatgttgaccagcgtcgcgcagtctgccataccgtcatttccgggcgcggcgtacaccgtgtcaacaagcgggctttgcgccgctttccaagccaatgtatgctctctgccgccttttccgataatcaatacattcacgcttcgttccccctcttaatgtttgaaatgtctgatgccggtgaataccatagcgatcccgtattcatccgcttttttaatcgaatcttcatcgcggaccgatccgcctggctggataatcgccgtgacaccggcttttgcggcttcttcgactgtatccggcatcgggaaaaacgcgtctgatccgagcgcgctgccttttgctttttctccggcctgctcaatggcgattttagctgaaccgacgcgattcatctgccccgcgcccacaccgaccgtcatatggtcttttgtaagaacgatcgcgttggatttcacatgtttgacgactttccaggccagcttcaaatcttcccattcctgctcgctcggctctctttttgtcgggatgctgatgtcggcgtcatcaaatccatggacgtctaagtcttgaatcaaaagaccgccctgtacggatgtcagctgtttttctttcttccctgatgcggtcacgtcaagcgtgagcagacgaaggtttttcttcgccgtcagtacgttcagcgcttcttcactgaaagaaggggcgataatgatttctaaaaagatgccgtgaaggacttcagccgttgcctgatcaacttcacggttcagcgcgatgatgccgccgaaaatggaggttttatcagcttcatacgctttattgaatgcttcctcaattgaagctcccgtaccgactccgcacgggttcatatgtttaacggcaacagccgcgggttctgtaaattcccgaacgatttgaacggccgcatctgcgtccttaatgttgttgtaagaaagctctttgccgtgaagctgttttgccgccgcgatggaaccggagacaggaagtgcgcgttggtagaaaaccgcctcttggtgagggttttcaccgtagcggagcgattgttttttctcaaatgtaacggtgaattgctcagggtctttctcatcggcctcgcgtgttaagtaatcagcgattaatgcgtcgtatgccgcggtatggcggaatactttggccgcaagctcgcgttttcttttaagagaaacgccgccgtgttctttaatctcattgagcacggagctgtaatcggccggatctgtgatgaccgtcacatcctgatggtttttcgaggcggcgcgcagcatgccgggaccgccgatatcaatgttttctatcgcttcatcgtatgttacgtcttcttttgaaatcgtttctttaaacggataaaggttgacaaccacaaggtcaatcggggcaatgccatgctcattgatctgcgccatatgctcttcattgtctcttacggcaagcaggccgccgtgaatattaggatggagggtttttaaccgtccgtccataatttcaggaaatccggtcacttctgaaatgccgatgacatccacaccgttttcctgaagaagtttttttgttcctccggtcgaaatgacttcgacgccgagctctgtcagttcctttacgaaaggtacgagatttgttttatcagaaacactgattagtgcgcgtttgattgtcatgccttttcacctctgttatttagtcccagcagctgtttcacaacgctcggataccatttgtgctcaagctcgtgtattgtatgctctatgtcttcaagcgtatcgttttcctgtatttcgaatgctttttgcgcgataatcggtccggtgtccatgccttcgtcgacgtaatgaacggtaatgccagccactttcacaccggcccgatacgcctgtccgacagcgtcaatcccggggaatgccggaagaagcgagggatgtatattaataatgcggcccccgtatgcttcaagcagcgtatctccaatcagtctcatatagccggcgagaacgattaattccgccccgtgcaggcgcagctgttcaataacggcccgttcaaaggccgctttgttttcaaaagatgacggttgaaaggcgaatgacgggatatgtaaagcctccgccctttccaccgcctttgcctgaggcttatccgtcacgagaagcgagagctccgcatcccacttctcttctctcatacgtttggcaatggcctcgaagttcgatccgtttcctgaagcaaataccgcaaactttttcatgaaagagccgcaccgccgaaagaaatgccttcgccccgcttgacccggccgatcaaataagccttctcgccctgagcttcaagcgtgtcgataacgtctgtcaagtcctcttctttaacggcaaggacaaaaccgatgcccatattaaagacattgaacatttcttcttctttcagcttgccgtgctcctgcagaaacggaaaaatcggcgggatcggccatgatccgtgatcaatttccgcactcaatccgtccggcagcatccgcgggatgttctcgatgaatcctccgcctgtcacatgcgccatgccgtccaccttaccgcttttcaccgccttgagcaccggcttcacatatattctcgtcggttccagcaattcttctccgagaggacgcgcaaacggttcatagacagtatccaaatcaagtccgccgtcatcaagaagcacttttctcacaagggaaaatccgttgctgtgaaggccgcttgaagtaagtccgattaagagatgcccctcttcgatatgttcaccggtgacgatttcatctttttccgcgacgccgactgaaaagccggcaatatcgtattcatcagccgtatacagccccggcatttccgccgtctcaccgccgataagcgctgatcctgactgctcgcatccgtccgccacgccctgaacgatctgctcaatttttaccggatcagccttgccgaccgccaaataatcaaggaaaaacagcggctctgctccttgggcaagcacatcatttacacacatcgcgaccgcatcgacgccgatcgtgtcatgcttatccattgaaaatgcgagtttcagcttggtgccgacaccgtctgttccggaaattaaaacaggcttttgatacggaagctctgacagatcaaacattccgccaaaaccgcccaggcttcccataacgccgagccttttcgtgcgctccacgtgttttttcattcgtttgacggcttcgtatccggcttcgatgtcaactccggcatttttataagcatcagacatccctatcactccttgtcaattcgtttctccttaaaaggcagaaagagaaaggcagcctgaattcccgctgcctttatatcattttcagattttattttgtcagcaccgcttcttttacgtgaggaagcactgtatcctgataaatttccgtcggatatttgcccgtaaaacaagcgaggcattgtccgcagttggtgtcttcaaattttcggccgactccttttaacaatccgtctacacttaagaaagaaagcgtgtcggcaccgatgatctggcggatttcttccacagaatgagaggaagcgatcagctcctcatgggttgatgtgtcgatgccgtaaaagcacggatgagcgatcggcggtgaactgatcttgacgtgcacctctgtcgctcccgcttctctgagcattgtgacaatccggcggcttgtcgtcccgcgcacgatggaatcatcaaccatgacgacccgttttccttcaacaacaccgcggacggcggacagcttcattctgacgccttgctcacggagagcctgtgacggctggataaacgttctgccgacataacgatttttaatgagaccgagttcgtacgggatgcccgttgcctcggcatagccgatggctgcagaaatactggaatcaggcacgcctgtgacgacatccgcttcaaccgcggactcctgggcaagcatttttccgaggtttttccgggcgctgtgcacgttaatgccgtcgatattgctgtcaggtcttgagaaataaatgtactccatgctgcagatggaacggttgatattcatggagaaacgctctgatttcatgccttcatcattgatgatcagcatttcgcccggctctacctcgcgaaggtaagtcgcaccgaccacatcgaatgcgcacgtttctgaagcgacgacgtaagcatcacccatcatgccgattgacagcggtctgagtccgttcgggtcaagcgctacgatcatttctgtttcagtcataatcaggaacgcgtaggcgcctttcagcatggacagcgaatttttgatctgatccttcagcgaaaagtgtccgctgcgtttaatcagatgagccagcacctccgtatcggaggaagtctgaaagatgctcccttggttttcaagctgctgcttcaactgtgtggcgttgaccaagttgccgttatgggcgagcgcgaggctgccgttgttttgcgaacggaacaggagcggctgaacattttcatatccgcctccgcctgccgtcgcataacggacgtgcccgatcgcgccttttcccttcactttgctcagttcgccgttttgaaaaacctcggtaataagcccctgtcctttatgcgccgtcagtttttcaccgtcagtcgccacgatgccggcgccttcctgtcctctgtgctggaggctgtgcaggccgtaatatgtgatctgcggagcttcttcatgtccccagatgccaaacacaccgcattcttcattcaggcctttgatttcagcaagcatggaatagctcctttccacgcgcgctcaagttctttcgtttgcgcgtgaaccaattgttgtccgtcctggttttgaatcgccagaagtccgtcagccgttacctcgccgatatgaaccgcatcagccacagccgcttcaaacgcctcttggtgttcttttttcactgaaacgacgaagcgggattgagattcagagaataataatgccgcttccccttctacagtcacgttggcgccaaggttttccgtcgtcatgacgctttctgcaatcgctacgcctaagccgccttctgatacgtcatgcgcggattgaacgaagcctttttttatcgcgtcaagcaatgctttttgacgtgacagctctatatcaagatcgatttgcggcgctttgccgtaaatgcggccttctgtcattttttgcagttcgcttccggcaaactcaggttttgtttcgccgatcacgtatacaagatcccccgcttgtttgaaatgctgtgtcgtaatatgagcggtatcttcaattaagccgaccatgccgataacaggcgtcgggtagatcgccgttccgttcgattcattataaagtgatacgtttccgccgatgacgggtgtgctgagaacattgcacgcctcgctgatgccgtcggccgctttttcgatctgccagaaaatttcaggtttttccgggtttccgaaattcagattatccgtgaccgcaagcggttcggcgcctgagcatacgatgttgcgcgccgcttcggcaacggcgattttcccgccttcttctggatcaagatagagataacgggcgttacaatccgtcgtcatcgccagcgcttttttcgtgccgcggattctgagcactcccgcgtcagagcccggagcgaccaccgtatttgtgcgcaccatgtagtcatattgatcgtacacccactctttgctggcgattgtcggctgctgcagcagggcaaaaagcgtctctgtcgcatcttttacttcaggcgctggaacttccgtttcctgaaactcgcggtagtacgcgggttctgctgacggcttgtggtatacaggcgcttcttccgccagcgcgtcgaccggaagctcgcaaacaacctctccgttatggcggaggcggagcattttatcatccgtaacatgacctacggaaaccgcttcgagatcatatttatcaaaaatatcgacaatttcctgttcacgtccgcgttcaatgacgagaagcatgcgttcctgagactcggaaagcatcatttcgtaagcggtcatacctgtttcccgctgcggaatgagatcaaggttcatttcaatgcctgagccggctttgcttgccatttcagcactcgaacttgtcagaccggccgcccccatatcctgaatgccgactaaggcgtcgcattggatgacttcaaggcatgcttccaagagaagtttttccatgaaaggatcgccgacctgcaccgcggaacgtttttcttcagatgaatctgacatttcttccgatgcgaaagtagcgccgtgtatgccgtcgcggcccgttttagcgccgacgtacatgaccgtgttgccgacacctttcgcctggccttttttaatatctttatgatcaattaagccgacgcacattgcattgacaagcggattgccctcatagcttgcgtcaaactgcacttctccgccgaccgtcggaattccgatacagtttccgtatcccgcgattcccgccactacttcttcaaacaagtacttcacacgaggtgaagtgagctcaccaaatcgaagagagtttaatacagctatcggacgggcgcccattgagaaaacgtcacggatgatgccgcccactcccgtcgcagcaccttggtatggctcaagcgctgacgggtggttatgagattcaattttgaacacgaccgcctgattgtcaccgatgtcaacgattcccgcgccttctccggggccctgcagcacgcgttcgccgctagtcgggaatttgcgtaaaaccggttttgagtttttatagctgcagtgctctgaccacatgacggaaaaaatcccgatttccgtgtagttcggcaatcttccgataatagattcaatgagtgcgaactcgtcatcactgacacccatttgctgatagagtttctcttcttttatttgttctttacttggttcaagcagtagcgacatgagtttccctccaatttttcacgatagaccggaacaatgtaagaccgtctgcgctgccgagcagttcatcgactgcgcgctcagggtgaggcatcatgcctaatacgttgcctttctcattcacgacgccggcaatgccgctgacgcttccgttaatatcgccgccgtatgtgaaggcgatttgattgttttcttttaatctttcaagcgtttcgtcatcacagtagaaattgccttcgccgtgggcaaccggaatcgtaatcgattgtcctttttcatatgaagatgtgaataacgtatcgccgttctgcacgattaattcaaccgggcggcagatgaactttaaatctttgttgcgtctcatcgcgcctggcagaagtccgagctcctgcagaatctggaatccgttgcagacgccgagaaccggttttccttcggcagccgcttttttcacggccggcatgatgtttgcgaatctggcgatggcgccgcatctcaagtagtcgccgtatgaaaacccgccggggatgagcacgccgtcaaatccgtcaaggcttgtttcctcgtgccagacatactcgacttcttcgccgagttcgtcctttacggcgtggaacatatcaatatcacagttggagccgggtaacacaatcaccgcaaatttcactgtgcgacaacctcctcaacttcatatcggtagtcttcaatgactgtattggcaaggagcttttcacacatttctttcacgagcgcgtcaagatcgcggtcagatttttcaatcgtcagctccatgtattttccgatgcgcacatcctgcacttcattgtaggtcatgctgtgcaatgcatgctgcaccgcgcttccttgaggatcgagcacactttcttttaagctgacataaactttcactttatacattatgaaatgcctcccagtcttttgaaaatctcttcatatgcgtcggttaagcttcccaggttccgtctgaacaaatctttatcgagcttttcgtttgtgtctttgtcccatagacggcacgtgtcaggagaaatttcatccgctaaaagcacccgtccctctgcgtctaagccgaattccagcttaaaatctattaatctgacgccgcagtcttcaaaaatatgctgcagttcctgattcacctggtttgtaatcgatttgatcgtttcgacctgctcaggaaccgccgctttcaagagccagatatgatcttctgtgatgagcggatcgcccagcgcgtcatccttgtagtaaaattcgataatcggctgcggaagctcagttccttccgggatgccgagacgtttcgacatgcttccggcggcaatgtttctgaccacgacttcaagcggaatgatgctcacttttttgataagctgctctgattctgaaacacgctccacaaagtggttgtcaattcctttggcgtgcagatgtttgaaaatcaggcttgaaatttcattgttcagacggccctttccgctgatctccgcttttttctcaccgttaaaggctgttgcggaatccttgtagaccacgcggagaatctgttcgtcttctgtttgataaattcgtttcgcttttccttcataaagaagattattgttcacaatattcacggaaggcctcctaacccgaatgttgggaatattcaatctatggcggctgaagaagccgcctccggctggcttcttctataaacctaaacgctcaaagatcaagtcgacgtttttcagatgataattgtagtcaaagcaatcggcaatctgttccggtgtgagacgggacgtgattttttcctccgcttcgacaagctggcggaaaggcacttgtttttcccacgcttccatcgctttcggctgaaccgtgtcatatgcttcttcacgaggcagacccgtgtcgattaaagcaagcagcacgcgctgagaatagatcaaaccgagtgtgcggtccatgttgcgtttcatattttccgggaataccgttaagtttttgacgatattgctgaatcggttcagcatgtaattcagcgcgattgtcgcgtcaggaagaatgatgcgctcagctgatgaatgagaaatatcacgctcatgccataacggtacattttcgtatgccgtcagcatatacccgcggattacgcgcgccatgcccgtcatattttccgacccgatcggattccgtttatgaggcatagccgatgaacctttttgtcctttagcaaaaaactcttccacttcacgtgtttcactcttttgcagaccgcggatttccactgcgaatttttcaatgctcgtcgcgatcaaagccagtgccgccatgtaatccgcatgtcggtcgcgctgtaatgtctgagtggaaatcggcgccgctttcaggccgagtttttcacagacatactgctctacgaacggatcaatattcgcatatgtgccgaccgccccggaaagcttcccgacttcgatcccttcttttgcctgcttgaaacgttcaaggttgcgtttcatttcttcatgccaaagcgcgagtttcaggccgaatgtcgtcggttccgcgtgtacgccgtgcgtgcggcccatcatgaccgtgtatttatgttctttcgctttttcttttataatgtcaacaaatctctcaatgtccttgagcaagatctcattcgcctgttttaatagataggaaagagcggtatccacgacatctgttgacgtcaggccgtagtgaacccattttctttcttcgcctaatgattctgaaaccgcacgggtgaatgcaacgacgtcatggcgcgtatcctgctcgatttccaaaatgcggttgatgtcgaaagacgcgttttcacgcatgaccttgacgtcttctttcggaatgacgccaagctcagcccaggcttcacaggctaaaatctcgacttccagccatgcctggtatctgttttcgtccgtccagatcgcggacatttcaggtcttgaataacgttcgatcattatgctcgtcctccgtctcttttcatccatatgttcgtgatgtcctgaatccatgtttcatcaggcttccgcaaaaatgtcatatgtcccattttgcggcctttttttatctcatgtttcccatacaggtacagtttggcttcctttaaaagctccgtatgctcctccgcaagcttcacttcatcaccgagcagattcaccatcattcccggtttgagaagatcggttctgccgagaggaagtccgcagaccgctctgatgtgctgttcgaattggctcgtttcacaaaggtcgagcgtataatgccctgaattgtgaggacgcggcgccagttcattaatcaaaaggtctccgtcttccgtgacgaacatttccaccgcaaggggcccgacaagtttcaatttctccgcgagctgaacggcaagcgcctctgcccgcttttgaaccgtttcctccgctctcgcgggtacgatgctttggaacagaatattatttttgtggatattttcagcagccggaaaggttgaaatctcaccgtgcaccgatctcgtcacgataacggaaagctccatccggaacgatacccagctttcaagtatgcatgtgccgttttctaacagcgcagccgcttcatctgtctgtccttcttccttaatgacaaattggcctttgccgtcatatccgccgcggcatgttttcagcaccgccgggagccccagtgcctgaacggcttcctcaagctcccgtccgctgtttacgatccgataaggagcgacttgacagcctgctgactggatcgcctttttttccgtttccctgttttgggtgatgagcagcagctcgcttccctggggaagatatgcatgttctttgagccagttgagcgcctcgtaatcgatattttcaaattcgtaggtaatgatgtcactgactccggccaatttttgaatcgcttcacggtcattgtactgggcggtaatctcaatatcggcgatctgtccgcatggcgagtctttcacgggatcgacgacagcgactttatagcccatctgttttgcggcgacagccatcatttttccgagctgtccgcctccgataatgccgatgacggcgccgggaaaaatcgtttttttatcagacaagctgatcactgctttccagcaccgtttgttttgtcgcatttcttctcgcctctagtttatccgcaatgtcatcgtcaaatgccgacaaaatttgcgcggctaacagacccgcgttcactgcgcccgctttcccgatcgccgtcgtcgcgaccggcacgccgccgggcatctgtacgatagacagaagagaatcaagcccgttaagcgatttcgtctgaaccggtacgccgatcaccggcagcgtcgttttggccgccgtcattcccggcagatgcgccgctcctccggctccggcaataatgacttttaaacccctgtctcttgcgctttctgcatattcaaacatcaaatcaggcgtccggtgcgcggataccacctgtttttcataaggaatgtgaagttcgtcaagtatgtcgcatgcatgtttcattgtctcccaatcggaggtgcttcccatgatgattcctgctagcggctgcattctgttcccaccttctcatgctttgtttttcagaaaaaaaagcccggcttatattgcaactatgaggaagcaatacaaaccgggcatggtgcgcgtatcgtcagtcgttcgcttctgcgatatccatgtcagctgtttatcactttcctgcatagtccggccgtttacggcagccgggtagaaacttatgggccatattcccaagattatatgaggtcgtgttttgatttcatgtttatcttaacaacggacttggataatgtcaacgacattatcgaacgatataaaaattctttcttttaatgttcgtgtttagatcaatttcccttcaaatacgatttttttcccgcaaggaacgacttgaattgatccattttctttcttttctgtaaagattggctcttccatccgccggacgggcatataaccctcttccttcattaaagtgagaatggtgtcaatcgtttcgtcttccgttacttcaaaccgtttcttttttggctttgtcattccttaattctcctcttcttcactgctttcacccagaatccgccatggatcgttttcggctcaaaggcgatcataaacgctttttcatcaagcgttttaatcgtatcataaagctgaagctcatatttgcgcggtgtcagtatctgcatggcggtccggtctccttcaagtcctcccgcaacccagcttgtaaccccgtatcctttttcccggagctgtttcggcaggtccagatcgagctccttcgtaatgacgttgactgtaatatagccgagcgccagtttttcctcaattttcattcccactatgacgccgaggccgtagccgagtgcataggcaatgacgttttgaatttgattcagattgccgagcacgagactcaggccggtcacatacacaaggatttcaatcgtactgatgcctgcggcgaaatagcgctgtccctttaatgtcagaatcatcctgatcgtaaagaaagagacatatataatgttaatgatgagaataatgagaaccatacctatactgttggataaaatcgtctgcatcattgattccccctcctctgataatttgaaaagccaatctttcaattaaggatagtttaccctcttttgatcattttcaaaagaaaaaaaagcccgccccgcaaggcagactttcaagctcttatcagtgaagctcggcttttttcaatcgtttgacggcttcatattccttctcaagctcactcagcgtgtatccggacagttcctgaacatggttttggtaaaaccctgagcggatcagctttgtcctcagatgctgttttttccgattaatggcttctcgcaacaatggggccatcttcatcatccctttccgaatcataaagagtagtgccgctttcgaattgctgttgctctcatcatatctcggccgggtcttcaaaacaacacgctttattagaaatatttgtaaacattgtgaaagacaaatttcgacttataaagggatcagcgaagcagtaaagtactctgaaatgagcggccatgtcacagccgtaaaaatgagcatgatgatgaccgccgcggaaatacagtacatcacgtcagccgcaggcttttcagccgatttgtaaagaatctgcacaaattgcaccatcgccgaggcggccagaaacaaggtcagcgccgtaaacaccacggtgacgaccggcagattcaatatcgcgaaaatcatccacacgatagagcaggcgacagccggaaccaaaagcgatccgacccccgcggccgcatcccgcatcgtgattttctgtttcatcatataacgtgatacaagccagaccgccccggccgcagcggcaaaaaagacgagcgtatacacgagaacgacggtaaagccgtcaaaaaacgtatgatgccgctctccgtatccgagaggcctttgctggcttgccctcagctgaaaccaatttccgattgagaaaaagatactgaatacaagcattgaaataagagcatatttaaagcgggaaaagccgtcttccccaacgaccttcaccggtgatgtcaaaatgcgcagcgcgaaacggcaataacgtttgaccgcggcccatgcagaagcgagtttttccgtaaaagccggagccgggcgccgttccttttcttttttcttttgcttttgataacgtcccgcatttctggacattctcgacagcggttcttcatcagtcccctgatgctgtttttcttcttccaacgtttcttttctttcttccgtcatgtcagcaactcctatcaaaaaaatacggcggaatttgttaagcaagaaaataaaacacttatataaggtaccgaagcgtccttaaacagtcaagcggttttcttcacccggacacccacatgacgttttatattatgtattggttttacggaataggacaaaaacaaaaaaccggctgaactcagccggtttttccgttattttaagaagataaaatacaggataaagatgacgaacagcccgtacataatcggatgaacgctttttccttttcctttgcagatcattgtaatcgggtagaatataaaaccgatcgcaatccccgtcgcaatgctgtacgtcagcggcatcataatcatcgttaagaatgccggcacagccacctcgaatttatcccaggcgatcttaccgagcggcgccaccatcagcgcgccgacaataattaaagccggagccgtcacattcgtggtgacgactgacagaagcggcgagaaaaacatcgccagcaaaaagagaatgcccgtcacaacagccgcgaagccggagcgcgcccccgccgcaacgcctgagctggattcaacataagaagtcgttgtagacgtaccgagtacggctccgataacgattgatgtcgaatccgccagaagcgctcttcccgcacgcggaagtttattttccttcatcagcccggcctgtgtcgctacagccaccagcgttccggccgtatcaaaaaacccgacgaacaggaacgttaaaatgacaatcagcatttgtacggagaagatatccggaagatgcatccacgcctgtccgaaagtcggcgcaagactcggcacgctgccgacaatgtgcgtcggaaccggaatcagtccgcagaccatgccggcaaccgccgtcagaagcattccgataaatacgccgccgtttacgcgaagcaccatcagaatgacagtcacaataacaccgaaaaccgtcagcagcacagggccgctgtgaatattgccgatagacaccaaagtcgatgagttcgcttcaataatgcccgaaccctgcaaaccgacaaatgtgatgaacaaaccgatacccgcgccgaccgccaatttcagctcaggcggaatcgcattaatgattttttcccgcaatcccgtcagcgaaagcgccacgaagataattccggaaatcaagacgccggaaagcgcagcctgccatgaaatccccatgccgaggacgacagagaaagcaaaaaacgcatttaatcccatacccggcgcaatcgcgatcggatactttgcaatgagccccattaaaatacagccggccgcagatgccaaggctgtagcggtgaacaccgcgccctgatcaatttttaatgcttcaggaaatcccttcacaccgtttaaagacaatgtcagcggattgacgaacagaatgtacgccattgacaaaaaggtcgttaaaccgccgatgatttcattacgatagcttgtccccagctcgtcaaactgaaaaaattgcttcaagccaattgcctccttcattctctcccatttattctgcccgatatccgccaaataaaaaacgccccaaatacatttgggacgcttgactacatacgttcagtctgaataaataagaatggattatttatatcaaacgattgagattgatccgtagtcaagccatttacggtagcttggtagaaacttgcgggccatatccccgccattatacgatatctgcatatttgatttctgagtctattgtatcaattcaattttgaaaactcaataaaaaaaacgaacaatcccgttaaaaaaatttggtttattcgttaattgaccaaaaatggaagacggcaaaagccgccttcccgacatcattttccgtcagcaggccgaaccggcaccgcgaatgtgatccccttgtcatccgccagcaagttcataaccgtttgattgacgtacaaagcgtatgaatcgaatgagaaatcgcgcaacgaatagtctttattggatgaatcatccaattcaaaaacggattccatttcacccgttttaaggttcgtgactttcgccttattccctttcagataatagcctttttcatactcattaagcgatggccaggttttcatttttttcgtattgccgagaccgatagactcaccgacattcatcagctgatctttatccgttttgctgtcattaattcctgtgaattgataatcgacgatcacccgtctgccttgctgtttgatctttttgatggtaatgccgacatgatgatgtttcgttttatagctggcgggcagttttgttttcagaggcacgatttctcccggctctgattctgattttaaattacccgttatgaaaagtgttttcgctttcgggtctatcggtttgctgaattgagtttggccgcgtactcttttcccgccgccgggaaggttcttcctgctgccaagttcaatattcgacatcgtcatttcataatggtttccagcatcatccgatgcctcgtcaatcgagatggcatcatttttagcggcatcttgaaagtcgactgaatacaggagagccgatcccatcgttccgttttccgcccggatatcgaaaaagcggtataacccgtttacattcacagctttcgttccttcaagagaaacggacttttgttttttgaccggaagtgtaaagcgccagtttccggggatatccttaatttgtgtaatgacaagcggaagcttatcaccgtctttcagctttgagccgtccgcaaaaaagcgaagctgccccccgtactgcccgtctttcatttttttcatatcactgctgtcataatcctctgctaacatattccgtggatctttataatcaacttgaaaagagatgctctcctcatctgatttcaaattgtcaacggtaaaattgtaaacgagctgtccgctgtcgtaatacacacttttcactgtcaccatgattccgcgtgattctgctttctcattcagttttgtcaccaaattgcttttaaacagcgcagaacctgccttatcctgaaataccctgtaaatctgcccggcaacagggatgtttcccatagccgtattaacggagggcatgaataagcctgaggacaaatacagaataaacaaagcagcagcaaccgcgagtccgtttatcacttttcgtccccatctccgtctgacggcgccttcttttccggcacggacagcagcgctatgtatcacgtttttcaattcagctttcggcacgtcaatgtcctgatacaattgcttcatttgatgcttttccatatatgtttatcctccttttccagctcctgcttcaatgcttttctcgccctgtggagatgcgtttttacagtgccttccgccataccggtctgttcagcgatcatagcaatcgagaaatcttgaaaataataaagctgaatggtcagctgtatatgttcgtcaagggtttccagggcattccgaagatctatgtattcttcaatgttcttattctccgcgcgcgtatcatgttgcggctcaaacggaatgacgtctccgtgctttttcctcatcgcaaaaatcgtatgaagcaaaatccggatcagccacgttttaaaatatttcggctccttcagctgcgcgatatgaagaaaagccttgtaagccgtttcctgaacagcgtccagtgtatcttccttgtgatgcaaatagagataagctgttttatataaagtatcctggtgtgctgtgatcagtttttcaaaggctgcggcatcaccttttttcgcctttttgatcaatcgttcttccttcaccttatccacctcctatgctgttagatatgaatcggggcaaaacggtttcaaaaagatgaaaaaaaacgcctcttttttaaaaagagacgttttttatcttcatttattcccactcaatcgttgcaggcggcttgctcgtaatgtcatacacgacgcggttgatgtgtttcacttcgttgacgatccgtgtcgaaatcacttcaagcacatcccaagggatacgcgcccagtcagatgtcatgccgtcaattgatgttacggcacggataccgattgtgtaatcatacgttctcgcatctcccatgacgccgacgctgcggatatcaggaagaaccgtgaagtactgccagatgtcgcgctctaggccgtggttcgccacttcttcacgaagaatcgcgtctgattcacgaacgatctcaagtttttcttccgttacttcaccgagtacgcggatgccaagtccagggcccgggaacggctgacgccatacgatatcatccggaaggccgagctctgtgccgagcgcgcgcacttcgtctttgaaaagggtgttcagcggctcgatcagttcaaactgcatatcttcaggaagtccgccgacattgtgatgcgatttgatcgtttgcgccgttgcagtaccgctctcgataatatccgtgtaaagcgttccttgcgcaaggtaatcgatgcctttaagcttgtccgcttcatcatcaaacacgtaaatgaattcgttgccgatgattttgcgtttttgctcaggatcagaaacacctttcagcttgtttaagaatctgtctttcgcatcaactttaatgacattcatattaaagccttcgctgaacgttttcatgacgccttcagcttcgcctttacgaagcagaccgtgatcgacgaaaatacaagtcagctggtcgccgatcgctttatgaatcaaagcagccacaacagaggaatcaacaccgccgcttagcgcgcaaagaacctgcttgtctccgactgtttcacggattttttgcatttcgatttcgataaagttttccattgaccatttgccttcacaatcgcaaacgccgaatacaaagtttttcagaagatcattgccgtattcagagtggcgcacttccgggtggaactgaacgccgtaccaattcttgtccgctttgctcatcgctgaattcgggcagtgatggcttgttgcgtcaacagtgaagccttcaggaacttctacaaccaaatcgccgtggctcatccacacaacctgttcttccggaagatctttgaacaagtcaggagttccttgaatctgaatgttcgcttttccgtattcgcgctggcttgccgcctcgactttccctccgagataatgagtcatcagctgcatgccgtagcagatgcctaatacaggaatatcgagttcaaagattttttcgtcacagcggaaagatccttcatcatatacactgttcggtccgcctgaaaggataattccttttggattcatttctttgatttcctcagctgtcaacgtatggggatgcagctcgctatatacgccaaattcacggatccggcgggtaatcagctggttatactgactgccgaaatcaagaacaagaatcatttcattcactaacttcgtcatggttgtcacctaatctcctctaagtttttgacacagaaaaaacggaggacaaacgttcagccctctgtcgcgcaagacttgtacggaagcccggctttttaacgctcccgggctcccttttaacattcatttattctaacaacaggacgatatgcggtcaagactatcttgttttaattatattttcccacaactgtcctgattcattccaaagctttgcggcattatccctgcggtataaggcccgctcatagcgcagcgtcagctcggacatgtcgtttgtaccgtatgcctcgtcaatcctcgcggcaaaatcgcgcagcgtttctccgtcccctctgctgaatccttttcgtttcagctggcggagcagcgcggcatatgcgtcgaaaaagacgtcttcatccgtacgccgcttcaatctggctgctgtaacgtgcggaatccagcgcgcccggaacagccaggcgagtgccgccgcggctgaaatcacgatgacgatggctgcatacggccacaggtgtgccgcggttttgttgcggatcacaggatgcggtgccgcgctgtgatcccgctttttcggtgtttcttctttttccggctttgtttcctgacgctgcttgtcagacggtgaatccgaattccccgctgagcctccgctgtcttttgccgcggtatgattttgctctgacgtaaactccgtcggattggtgaagccttttgtcggctcaaacgtcacccagccctgatcgggaaaatacacttctacccacgaatgggcgttgttgtttgtgacttcataaatgtggccgttatggtcgcctgcccctttatattcgccggatgtatagcccttcacccaacgggcgggaattcccgcggagcggagcagcaccgccattgccgatgaaaagttatcacaatatcctcttttcgtttcaaacagaaattgatcgacataatcctgattgtgctccggaaccgcgacatcctgtgtattatacgaaaatgcggaagatccgagataatcctcgatcgccttcgctttatcgaacatattatgatgatcccgtgtcagtctgtccgcaagctgtctcactcttttcggaaggttgtcggggacctgtaaataccggtcattgaattgattctgctcacggtatcgtttcactttcacttttctgagatcattcagcttaaagacgggcgcctgaaaggtcaccgtgtaccgtcccatattgcggatgttgcccacttgttcactgaccggcgtaatttgctcggtgtttccgttcatttcaagctgaatcgagtgcttcggtttaatattggagacgccgatcggatacacgacgtgattatagagataattctcatcaatggacacctgtgccgtataccgtctcgtctgcacacttcggtcaaaccatatatcttccacgttgccgccgttcagtttataggacatgccctgatcggtctccacccagcctttccccgtgtatgtatccttcgtttccacccggaagtacgcccgttcttttcccttccatgtaaaaaccggcgtatcatcctgctgaaaagggccgcccaatgtttcatcatgattgccgtagccgattttgctttcggcggcgggcacttctttgtggtttgttatttttttaagaaacggcacggggtccggccagttcgggtctgatttcggagccgccagaccgaacacgacggaagcgcagataaacaacatcagcggcagaaaccatttgagtatcaatctttttttaaacgctatatgttccgtaagccggatgcgctccatatacaaaagccccatcatcaaaaagccgataaagacgatccggatgacggcgtacgcggcatcataaggagtaaacgtatcaagcacggtgatatacgccaccgtcatgataaaaaagaataatattttccgctgatagatcacccagtaatgcagcaaatacacgagcagccataaaagcacaaaaaacagcaacgtgcggaatgacggattcatatcattccatctgccggtcccgatgtggcgggcattttgcatcacgtcctgcaaaaaagaaacgagccattccggctgaaaaatagaacctttataaaacaggatgtgaatactgatcaacgtaaacagaatgcaggacggcacggtgacgtaccacctcatccggaagaatgacagcagaaatgccaaaccgataaaaacgatgaaaaaaccggtatgttttgtatccgtaaaattgtgcagcggcctgagccattcccataacaataaaaaagcgagaaaataaaacagcagcagactcagcctgcttccctggttctcgtcatgcggcatggcgcgccacctctctttctaaacaacatgggacacccgtttgtccctgatcatttgcaccttaatatttttttgagcgaagatgagagcgagtttccgttctttctccgaaagcgcggcattcgtttctttcgccaaaaacaccgtcatgtcagcacggccgggctcagcctgtttgagaaggtcttctgtaagactgcccgtcacgacggcaatggaagctttgcggacgcgcggatccgccagctcttttcctaaacgcccgcctgcatcggcttcttctgattctgaagctgatgccaggtaacgcagcatctttctgaaatgccggtctccctcccggacgggaaatacggtccggtcgctccccaatgaaataaatcctgcgggagagcccttcacaagcgccgtgtaaagcagggatgccgaagcggataccgcggcttcaaacgatggggacggcctgcagtccaaaaggagaatcatattcacactctgcagcgggtcaaattccttcgtcatcagctcatttcgccgcgccgatgttttccagtcaagtgcggaaaaccggtcgcccggctgataatttctgacgctcgcagccattgcggagcggtgtacctgaaacggagcgccggcagccgcaccctcttccccggaggcagcctgcggcttatagtgaacagacccgtacgccgggaaaaccagaaccgtatccgtaacggaaaacgacgccgtcttgtccaaaagcccgagaacatctcccgtccgcactcttatcgtatgtaaatgatgctctccgcgcggcacctgcggcagctcatattgtaacgtcagcttcctttgaaaccacggaaacacaagctgtttcgcactgcgcctctcgccaagcgtttccggcatcacatcttcaatgaccatatatgtcagcggaaacggcaggcgcctcgccagcctgatggtgacagacagcctgtcgcctgaggttaactgggcggaggacacgtcacgcgtcacctgaaacgcccgcagcgggtacacagcgaccagcccggcgtaaacggtaaccggcaaaaacgcataaaataaaaaccagctcacaaatccgccctgaaacatggcataagaaaagacagccgccgtcagtacggccaacataagcagcttccagccatatagaagccaatgcatcttctttctcattagcggaccgacatcctttggacggggactttttccgtttgcatgatgtcttctataaccgcttccggtgtcacatcgttaaatttcgcctcggcggtcaagatcattctgtgcggcagcgtatacggagccaaatactggacgtcatcaggaatgacgtaatcgcggtcatgaagcagcgcatacgcctgcgcggctttcattaatgagattgaaccgcgcggacttacgcccagatgtacggacggatgccggcgggtatgctgagtaatgccgacgatatacgcttttattccatcatccacccgcacctgctccagtttttgctgaaggctgataaactgttctttagaaatgacgggctcgattgtttcaagcggattgcgcccttcctgcaaagacagaacccgaagctcctcctcggcagtcgggtagcccatgcgcagcttaaataaaaaccggtcaagctgggcttcgggaagcggatacgttccttcatattcaaccgggttttgtgtggccatgacgaaaaacggctcagccagccgcattgtctttccgtcaatcgtgacattcccttcctccattgcctcaagcagggaagactgcgttttcggagaggttctgttaatttcatcagccagcacgatattccccatgatcggtccagggcggtattcaaattccatcgttttcgtattataaatagagacacccgtcacatctgacggcagaagatccggcgtgaactgaatcctcttaaagtcagctccgatcagcttggccaaagcgcggaccatcatcgtttttccgactcccggcacgtcttccagcagcacatgcccttttgcgagaatggcggccagactgagtatggcgatatcccgttttcctatgatgatgttttcaatatgctcaacggctttctccagcagcggatgcagctcttctttataagccattcttctcctcctagtcatctctcaaatttcaattatcgtaacctaactttaccacaaaatataaacagtataaaaaaacgtttccagcgaattgtttccagccctaaaaggaaaaagctccctttaaaaaggaagctttatttcagctggagaggctccatatgaacgtgtgaatggtcaatggcatgttcctctttcatcccggcgccttctgctgtacggacgagaaaaaatgtcatattttcttacatcattttcaactgtctgtggcatttatgatagaataatacttgtcggaatattcagcataaacaaaccaaaaggaggcaaagaatgaatcagcctaactctttatcaaagggattaaaaacccgacatatgactatgatttcaattgccggcgtgatcggcgccggattatttgtcggaagcggatccgtcattcattccaccggacccggagcaattgtctcctacgcattagcaggactattagtgattttcattatgagaatgctgggggaaatgtcctccgtcaacccgacaagcggttcgttttcacagtacgcgcatgacgccatcggtccttgggccggttttacgatcggatggctgtattggtttttctgggtcatcgtcattgccattgaagccattgcaggcgccggaatcatacagtactggttcccgggcattccgttatggctgacgagtctgcttctgaccgtgctgttaacactgacgaatatttattcagttaaatcgttcggcgaatttgaatactggctttccttagtgaaggtagcgacgatcgttgtcttcttaatcgcgggatttgcgttcattttcgggatcgttcccggcagcaaaccggtcgggctggaaaatctggcgggcagcggcggatttttccctaaaggtccaagttccgttctgctcggcatcgtcgttgtcattttttctttcatgggatctgaaatcgtcgcaatcgcagccggagaaacgtcaaatccggtcgaatccgtcacaaaggcgacccgctcagtcgtttggcggatcattattttttacgtcggttccattgcggttgtggtcacactgctgccgtgggattcagccaatattttggaaagccccttcgttgccgttttgagccatatcggggttcccgcagccgctcaaatcatgaatttcatcgtcctgacagccgttctgtcctgcctgaactccgggctttatacgacgtcacggatgctgtattcactggcagagcgaaatgaagcgccgcggcgttttatgaaactgagtaaaagaggcgtaccggttcaagccattatcgccggcacctttttctcctatattgccgttgttatgaactacttttctcccgactccgtatttttgttcctggtcaattcatcaggggcgatcgcactgctcgtctatctcgttatcgccgtctcacatctgagaatgagaaagaaaatcgaacggacaaaccctgaatctcttaaaatcaaaatgtggttctatccgtacttaacctacctgacgatcatcgccatttgctccatcttgttatctatgctgtttatcagttcaatgcggtctgaatttctgctgacaggatttattactctgctggtacttgcctcatatgtattccgcaaaaaacaaaaaccgaaagagagcgcttccgaaagccgggttgcgcaataaccgcaaacaccccccctcaaaaaagggcgggtgtttttttaaccaacctgttcaaggcagcattaactgtagtacaggatttcaataaatgataaggacaggatgaaaaatggcactagaaaaatttgcagatgaactgccgatcatcgaaacactccagccgcagaagaaatcagacggcagcacgtattatgaagtcaccatgaaggaatgctttcacaagctgcaccgcgatctcccgccgacccggctgtgggggtataacggtttatttcccggtccgacgatcgacgtgaaccaagatgagaacgtctatattaaatggatgaatgaccttccggataagcattttctgcctgtggatcataccattcaccattcagaaagcggccatcaggaacccgatgtcaaaaccgtcgtccatttacacggaggagcaaccccgccggacagcgacggctacccggaagcatggttcacaaaggattttaaggaaacgggtccttattttgagaaagaggtataccattatccaaacaaacagcgcggggctctgttatggtatcacgatcacgccatggcgattacgaggctcaatgtgtacgccgggcttgccgggatgtatatcattcgcgagcgaaaagaaaagcagctgaagcttccctccggagagtatgacgtaccgcttatgattttggaccgcacgttaaatgacgacggttccttgtcttatccgagcggacctgctaacccttccgaaacgctgcccgatccttccatcgtcccgtttttttgcggaaataccattctcgtcaatggtaaagcgtggccgtatatggaagttgaaccgcggacatatcgtttccgcatccttaatgcctccaatacgagaacattttctctctcgctcaataacggcgggaagtttatccagatcggttctgacggcggactgcttccccgctctgtcaaaacacaatctatcagcttagccccggcagagcggtatgatgtgctcatcgatttctccgcctttgacggagaacatatcattttaacgaacggcaccggctgcgggggcgatgtcaatccggatacagacgccaatgtgatgcaattccgcgtcacaaaaccgctgaaaggagaagacacaagccggaagcctaaatatctttcaacaatgcctaatgtgacatcaaaaagaatacacaatatcaggacgcttaaactcacaaatacgcaagacaaatacggccggcccgttttgacgctgaataacaagcgatggcatgatcctgtgacagaagcgccgaagctcggcacaacggaaatctggtcgattatcaatccggtggggggaacccatccgatacacctgcaccttgtttccttccaaatccttgaccggcgtccttttgacttagagcgttataacaaattcggcgacattgtgtatacagggccagccgtcccgcctcctccaagtgaaaaaggctggaaagataccgtgcaggcgcactcgggagaggtcatcagaatcgcggcgaccttcgctccttacagcggacgctacgtatggcactgtcatattttagagcacgaagattacgacatgatgagaccgatggacgtcacggataagcagtaaacaaatatcaccccttttagagaaggggcttttttatttatccaaaaagaaaaaataagaagacacttatttgcatatactgtaataacaggaagacgatgcaccctcattggaaatctggatagaaaaaggaattaggagattagggaaaagtatgagacaatgaaggagtgcacgaaaattcataagggaagaagtgactttatgtcttactacaacaaacgtaatcaggaaccgctgcctaaagaagatgtcagtacgtgggaatgcacaaaagaggactgtattggctggagcagaaagaattttgccggcagtgataccccgacttgccccctttgcggcagtaaaatgatcgacggcgtccgttcgttggtaaatctccaaaacaataatcaaacggcatcaagttagacctcccttttacgagtctcaacatagagaaggcctccatgtctcatgagaggcctttgcgttatcattccttttatgatgcaaaggagcaatgaacatgaaaaacgatcggcagcagaaagatctgaaggaaatggcaaaacggcggaaaatgaaccttgccgcacagtcattcatcgaaacgcttcattttgccgttccgattctccgttttttcaaatggctcgcctcagccgcagccagctttgttcattaaaaaacacccagcgggcgctgagtgttttttttcatgattggatgacggaaaaactgttgataatgccgttgtcattttcccagactttttcgcattttttcgtatccaaatgataagcataaatggtccggaccttcgcattccgtcccgtttcatccttcagacgcttagcgccttttgcttccgccatgaaataaataatgctgccgtctttagaaaactgaggctgggcatcaatcagcggagtaaagtccttcccgtttgagataatcgtttcatcttttttcgttttgacattcatcagacggatggacgctttttgttccgtccctttttgggtataagatgtaaagacaaggttctttccgtccggtgacaccgccacgtcgctgataaactgttcaaggtttgtcagatcctgaaggtgttctcccgctcctgctgcaaaccggatattcgtcggttcagggtcaatccccttctcatttgcctcatccgttttttgataatcctcttttacggaataatgcagaagcgcaaaatcgttttggctgctgttataaaagaagctgctcacactgtcgtctttctcatcggcggcgggatacagatttacataacgtttcgttttcaaatcaaaagatgcgagacggaaaatatcttcatccgcttttccgagacggaaataaatgtgcgtcagatcctttgataaaaacagactgtcagcgcttgccgttcctttataaagcaccgtcttctttttcgtcttcagatcaagcttatacagacgcatctcattttggtcattattcccgacaaaatagagcacctgatgggcgtcatccagcgcaaacgccggatatgccgaaagcttttcctcgtacagcacgcggccgtcctcgtaatatttcgtcatcagatctttgtctgtaatggaaacaagcagcttgtcatggccgccggagacaacggcttttccgccgccgtcgctttttcctttaatcagtaaaacggccgcgatgaccgccgccgccaaaacggcggccagcaacatccagatccatcgtttcttcttcattatcaatctctccgtcaatcagaaaaagcaagaatcagtgtccttgctttttaagatggtctattttaatagctgtagtgtccggatactcttcctttgcttaatggatatccgagcgctttgaacgctttcgggctgacatccaatacggcattcggcatacggcctacatcatttttgtatacggtgataacctttttcggttttgcttttgcataagctctgattttcgttccgtttctcggaacgtcaaatcctaattttgtcgcgcaatcccagtgtcccagttttttaccggacgacccttttttaccgactccattataccatgtaatatttccgttcacttttttagcacttgcatcagaagagtaactgatcgctcccagcgtgcttcctgctaaaatcaataaggctaagaataacttcttcaagctttcgtcctcctgattctttattctaggcaaaattatacaccaagaagacgattataatatttcaatcactttacatgttcattacaacgtgatgagacatgcacataacgacggcacaatttcctgttctatataattccatggtaaattatactacaaaatttaattcattagcgttataatattcatagagtatttctgcattcaatatggactttttataaggcctattgatagttgcataatatgatatattttgagaaatcaggctttaggaagcaggcactttattccttttaaccgtggttcatattgatcatgtacctatactcgtttcaatcagactaggagtgataatcaatgaaagcggcaagatggcacaatcaaaaagacattcgaatcgaaaacattgatgaacctaaagcagaaccgggtaaagtcaaaattaaagtcaaatggtgcgggatttgcggaagcgaccttcatgaatatttgggaggcccgatctttattccggtcggcaaacctcatccgttaacaaacgaaatggcgcccgtcacgatgggccacgaattctcaggagaagtcgtggaagtgggcgaaggcgtcaaaaattacagcgtcggcgaccgtgtcgtcgtggaaccgatttttgccacacacggacaccagggagcctataaccttgatgaacaaatgggattcttaggcttagccggaggcggcggcggattttctgaatatgtatccgttgacgaagaattgctgtttaagcttcctgaagagctttcttacgaacagggcgcgcttgttgagccgtcagcggtagcgctttacgccgtccgccaaagcaaattaaaagcgggcgacaaggcggcagtttttggctgcggaccgatcgggctgcttgtgattgaagccctgaaagcggccggcgccacagatatttacgcggttgaactttcaccggaacgtcaggaaaaagcgaaagaactcggcgctatcatcattgatccgtcaaaaacggacgatgtcgttgaagaaatcgctaaacgcacaaacggcggcgttgatgtttcttatgaagtaacaggcgttcctgtcgttctccgccaggcgatccagtcaacaaacattgccggtgaaacggttatcgtcagcatctgggaaaaaggagcggaaattcatccgaacgatatcgtcatcaaagaacggaccgtaaaagggattatcggataccgtgacatcttcccttccgttcttgcactgatgaaagagggctacttctcagcagataagctcgtcacgaaaaaaatcgtgctcgacgatctgattgaagaaggcttcggcgctttaatcaaagagaaaaaccaagtgaaaatcttagtcaaaccgaactaaaccgttcagctgaatatcagacacatccgaaaaagagccgttccggctctttttttcatctcatcgtctttccttccttttccttttaaaaatgatcccctctgcgcaaactatttttcaccctgtcccgtctatccttaggcagcagcctatgatacgtatttttaaaaaaggagccctttgaagcaatgaagaacgaaacagccaaagcgtcgcttgtgacgtgcataactgagcgcaaggaagacttttaccggcttgcgtacagttacgtaaagaacaaggatgacgcgttagatattgttcaggaatcaattcaaaaagcgctgacatcggtcgaatccgtcaaaaaccccgatgtgatcaaaagctggttttataaaattttagtgcgcacggccattgattttctccgcaaacagaaaaaactgaaagtgatggacgatgaaacgatcgagtttttaagccgcggaaaggaagatcactacaaggacacagaccttcacgaagcgcttgatgacctgccgcatcaatataaaaccattatcattctgcgtttctttgaagacctgaaattagaagaaatcgcggacatcacgggggaaaacatcaacaccgtcaaaacacgcctttacagggggctgaagctcatgcgcattcagctgacaaaggaggatctttcttaatggaaaagagattagaacaattaagagaagagtataaaagtgtgcccattcctaaggaactggacagcattgtcgaaaaagcccttcagcagaaaccgaagaaaaaacgaatcgtgatgtggccgacatccgcggcagtcgctgcggccgtcttatttaccgccgttgtcaatatcaatccggatgccgcacaagccatgtctaaaatccccgtcatcggcaaagtcgtccaagccatcacattcacggagatgaaggaagaaaagaaccaatcaagcattgatgtgaaaacgcccgctctgtccggactttccgatcataaactcgaagacagcatcaaccggcattatatgaaagaaagcaaagagctgtatcaggaatttatgaaggcgacctcaaaaagcaaaaaaggccacctcagtatttacagcgattatgagaccgttactgacacagcggatttgatctcaatccgccgtgatatcgaaaaaacgcaagcttcctcttatacgcaaagccgttacatcacgattgataaaaagaatgaggccgtgcttacgttaaagagtttatttaaagatgaccgttatattaaagtcatcagcgaaaatattaaagaacaaatgaaaaaacagatgaaagaagatccgaataaaatatactgggtcgaagatgatgatatgacggagccttttaaagccatccgtgccgaccagaatttttatattacagataagcacaaacttgttatttcatttgatgaatacgaagcggcacccggatatatgggcgttacagagtttacaataccgacctccgtcatctccaagctgcttgtcggagaccgctacatcagataaagaaagaaaaaaatccatgatatccgcagatcatggattttttctttcgtcccgcaacagccaagatgcataagggacccttttcatataacagacgccggacgggggctgaaaagtttaagaaaatcacagcatttcattcattttttctgaaacaaaatccccttccgaatgcgtctaattaacggaacaaatggaagactgtacagaaatctgccatagccatccgcaaaacagcgagaatttccgcacacattattggaggaataccatgtcagacaagtcactgcatcaccgctatattcccggactggatggacttcgctcctttgccgtcctcgcagttatcgcatatcatctgaatttcaactgggccgacggcggtttcattggtgttgatatcttttttgttttatcggggtatttaattacatctattatattgcctgcccaaggcaatgccatcacccttgatttgcgtgatttttgggtgcgccggatcaggcggcttctgccggcggcttatctcatgattatcacgacggtcatttgggtcgtattgtttaacagcgagctcctgcataccgtacgcggggatgcggtctcctcacttttttacataagcaattggtggtttatctttcatcaactttcttatttcgacagcttcggctccccttcgccattaaaaaacctttggtcgctggcgattgaagaacagttttatatcatatggcccttcctgctgcttgcgggaatgtacatatgtaaaacacgggcccggcttgcggccgcggtcatgttcctcgcgttatgttcggcagtcgtaatgagtatgatgtatgtgcccggcggagatccgagccgcgtttattacgggacggatacccgctcatttgaattgctgatcggctgcgctttagctttagtgtggccgatgaaacgattatcttccaaacggctgccgagcagcatgaaacacctgcttcacgggacggagcttgccgcttttgccgcgctgctgctttgcgtcttttacacagatgaatatgaacccttcctgtacaagggcggcatgcttttgatcagcatcaccgcagcggttcttgtcgcatgtttatgccatccgagcagctttttgggacatgtcctttcatggaagccgcttcgctggatcggaacgagatcatacggaatctatctttggcattacccggttatcgtgctgagcacacccgtacaggaaatcggaaatccggtttattggcactgcgccgtcagaatcggcgccactttcattcttgccgagctgtcttaccatttcattgaacagccgatccgcactgcgggcttccggccatttttacgccgcgtgtttctgaaccgctttctggaatggaagacgtcctctgtcatcagccgaatgtcgctcggccttattcttgccgccattctcgtatttgcgggcgggctgtcagggatagccgaagagaaaaaacagccgcaatggacgtacgcgcaaaatgatcagcaagaaaccgccgcctcttcgcacaaaacggccgatcacgatcagcctgcaaaagaagaagacagcaagaaaaaacacggcggcgaaaaaacggacaccgcgtcagacaaaaacaagaaagaaccagcagacaaatcaaatacaaagaaaaacgaagagaaaaaggaacggtcatctcaaaaagcggctgattcaaaacaaacacagcctcagcaagacgtactggccatcggtgactcggtgatgctggacattgcgtcatacctgcggcagtccctccctcatgtcaccatcgacggaaaggtaggaagacaagtctctcaagcactccagctcacttcggaatatgcggcatttaatcagccggacaaagcggtcatcatcgagttagggacgaacggctatttcacaaacagccaaattgaatcactgatcagctccttttcaaaagccgatatctatcttgtcaacacacgtgtgccgcggcagtgggaaagtaaagtaaacgagtcattgcgccggcaggccgagtcacggaaaaatgtgacgcttgtcgattggcacgcaaaagcattgcagcaccctgaatacttcacaccggacggcgtccatctcatacctgagggatcaaaagcgctgacatccctcatcgtccaaacaatgaaatcatgacaaaaaaaagaggcccaaaaaaggcctctttttcgtatatcgtcaggcaagcttctgtccgcaattcggacaaaaattcgcgccttccgttttcgttccgcagttcggacagaatttcggcttagccgctccttccgagccgtttgccggtgccgtcccctgattctgctgactttgatcttgctgcggctggttctgctgattttggttcatttggttcatcatttgatttgccacattcattcccatcatcatgcccgccatgtctgaggcggcgccgcttccgttcattttgccggatgacattccgtccgtcatggaaatctgctgatagcggttcacatcgcccaccatgccgtaagaagcgtttttcgtaatcatatcctgaacttcctgcggatagttaaagctcataatattgaagcccgtaatcgacatgccgtctccgatcagctgcatatcaagatcttcttgaatcccttttccgatttcaaaggaattcgactgcagattgaacatgtcttttccttctctggtgatccatttcatcaaaagctgatcgagaatagacgtaatccggattttaatgtcctccactaaatagctgtctttgacacccgcaatcttatcaatcaatccgatgtagtcaatgaccttgaagttaaatgtgccgtttgcgcggatcggcataccgcccggcatacctgccgccggaatgttgatagcgtttttcgtgccccacttcacggtaaactccttcgtattcacaaacagcacttcagcccgcatgccgctgttaaagccaaacttaaacccttttagtgtagatagaaacggaatgatttctgattcgatatcataatcgccgtcatcacggaaaatcccttcaatcttcccgttgtataaaaagatggcatcctgtcccggccggataatcagacggctgccttttttaatttcacggttgttccatttatagaaaaccatgtcgtctctgaattcttcccattccaccacatttgctaactgatttctgaaaaaacccatgtatgctcaaatcctttacatataatttaaaaactacccttgcttccgctgtaactcgtgccgcccctcgtgactccgccgtcattgtcattatctttatcaggctttttttctcttgtaacgtcggttcggatatatgtgtcgtgctggctcagcacttcagacgtatcgtgatccatatacgtgctgccggtgacggtgaccttgccgccggaattgtacaccatcacagtgacggcgattccggccgcggctgcggcaataatgagctgaaaccaccatgtgagcagcagattgtcagacttgtcgtccgggcttttccccatatctttataagccaacttgatgtaggtctgaaacgccttttcataatggcctgcggaaatatctgacgagatcgtatttctgatcgtattcagccggctgttattcaaatacgtctccgcctttttatatccggagataaatacttcccgatttttcatatcaattgtcaaaatcgccgtgcttccgctaaaatgactgtcataaaaatcaccggcgtactgctcgatgtccttaccgcccgttccgtttgcggtaagaatgataaaatcggtatggcgctttgccccgagcttcccggccaattcctcaagtttcttcgtttcatccttcgttaataaatgagcattgtcataaacatattgcttctgttccgcggcagacgccgatgtatgtaaaccaaaagacagcatcagaaaaaggacgaagcagaagagacacgcttttttcatcgatactttcatcaaaaaccgcctcctatcataagtgagacgagtcttaatgctaaaaacgcaccggcggttatgccgccgaaccacgcggccacttttccggcactgatcggcggtttgccgacaaccttgcccgtctgcccgttcatcgcaaaaatgtgttcagcccgctcatagtcgtagctgaccatccagaccggaagcagtacgtaaaagctgctgattttatcggtctgaatctgctcatccgtaatgtcagccgtcgtatatccggagaaggtggatctgatataagaatcaatataatggctgattttatccttcgcccgcggaaagagatcgtcatcggtataattgtacttttccgctatatatcccgctaaataggccgtattaaactccttcagctcactgtatgagtaaggctccaatttgtccattaattcatcactcattttttctgaagcgtcgaccggaattttgagataatcaagattgatatcgcggtacgcgttgtaatactcggtctccgtcacccggtattctccatcatcatagtgatgcactctcgtacaaacggcattgacctgaaccttgctgtttaagtcaaacatccaaaacggcacgtacatgcccgttatgctcttcacccgatcggcagacataaatcctttcggtgtcagacggccgtttcggcaccactttttaaaagcgctcatggcctcttctttactgatcgtaaaaggaatcaccatcgaaggcgcgagatttcccgataatcggtcggcgagaacggcggctcctccgcaaaacccgcacgtcgtggccgtcgtttccgcctcagtcattaatactgcgccgcaattctcacaccggtactcgttcgcctcattttcagaaaatctcgtcgttatatactcttttggcaggctctcaatctgatcctgccgcccgcagctgtgacatgtcagcatgccggatgaactgtcaaagaccatatcatcgccgcagttcgggcatttataagaaatgatcattctgtttctctcactttctctttatatcggacaaaactgcagcccgctgtctattgatctttactgaaaagcattttctgcttaagcgccgccaattcatcatcgacactgctttgattgctgtcatatttagccgtcagatcgtcaatatcgtctttcggagacgcgttcagctcagccatcgcattggcatgatcaagcgcttggttgaccttgtcttccattctgccgaaagctgtcatcgattggcccgcatttgacacagaggaccccaatttgttcattctctcctgcgtttttgccacagaccacttcgctttgatggcatttcggcgcgactcaagctctccgatatcagcgacaagcttgtcatgcattttgcgcatttgagacgcgttggaagaagcgagctgataagccgtctgcagctcagtcagtcttgattcaacagccgctttcctttccaaaaatgtccgcgcatcggcttcattgccggcctgcaacgctttcatcgcataactttccatcttttcggcatcagcctggcattccgttaacgctcttttcgcccgctgttcctcagccatgacagaagccgtctccgctttcacttttcctaaatcattgttcagattccgcaaatattgatcaaccattttttcagggttttcagctttatccagcagcgcattgatattgcttgacatgatgtctttaaatcttcctaaaatactcatttttcattttcctcccaaaattaaatagtaacaagttcatagttatatatactgtttttttcaaaaaaagtttcattttctcatgaatttatgtattttatatgaaaatagtctcattcagcccatttgtgccggcggaaattctttatgaccagatacagtgagaacaaaaaataaataaaaagcccgatcatcaacccgctcactaacgggtaatgcttcgccgcatacacaaagaaatccagctgcgaaatctgttccggacttgtaatcgtttccgtcccattcaaaagctttgagaatttagccgtataattccaatcaaacgaatcagaaacaagctcactcccctgataccaattgacagcggcgagacaaagaaaacaaaaaacagaaaacgcgcattgcacaataagaaaaacatgtttcatgaaaaacattcctccgcggttcaatatcacaggccgtcacactatacatgacggcagcagcagaaacttggttttactcagaactgataaaaaagttattgtatgtacttcacagcggttcaatttactggatgcctttctaaagtataccgtatatcgaaaagggtttcagacctaaataaaagaggatgcttcccgaagtccgatgactttcaagaagcatcctcgatattttacagtgatacttcaacctcttttaaactcggcaaagcatcgatcgcaccgattttggtgcacacgagcgcccccaccttattggcaaatgagacaatatcacgcagcttcgcaaaatcttcggctgccgtctgaatctcatcggtgcgtgtcagctgatacagcgccgcgccgacaaacgcatctcccgctcccgttgagtctattgatgtcaccggaatgctcggaatgatgtcaatatccttcccatttgaaagaagggtcccgcttttcccgagtgtcaccgccacaataccggccccgagctcatgaagaaccgcaacaccttctttatgatccttcgcaccgctgatgatctcaagctcttcgtcactgactttcacaaaatcacttacggcaacggctttttttgcggtatttataaactctgaaactcttcctttccataaatcctcacggtagttaggatcgaaggaaataaactgtccattgtctttcgcaatcgacatcagccgtaaataggctgagcaaaacggatcagataacaatgccgtcgctgatccgaaatgaaggattttcgcatcgtttaccttttccagatcaatatcctccagcgtaaacaaagcgtccgctcctctgttaaacacaaagtcgcgctccccattttgttttaatgaaacaaacgcaagcgttgtaggcgctttctcatccatgacgagcatagaggtatcgacgtgtacggcgtccaatgtctgcttcagaaaatacccgaacggatctttgcctgtttttccgctgaaagccgcgtctccgcccagcatagcaatcgctgccgacacattcgccggtgccccgccggcactttttaagaaattgcgtcctttcgtcaaatcaacatccacatcggtacaaaagaaatcaattaacaattctccaatacaaataacagattggcttcccacattatcacactcatttatcaattctcgattatagtttcagtatagtgctttctgtcataaatacaaccgtttacatagaatattttaaattttacgtatactcatcttgcagctctttgctccagatcagacatcatctgctgatattttttttcagttaaaggataaaaagaaataagaataatagacagcagaatgaacaatcccggaatgagcgcattcatatttttaatcgcattcaatgacgaggccgtctgatcggtattcgcggcatatccggcgattccgagataaacggccgaaaatgacccggctaacgcaactccgagcttattgatgaaactcatgctcgaaatcaccacgccatcagcccggactccggttttccattccgcataatcgacacaatcggcaaccattccccaagcaagcgtatttaaaggcgtcgtaaaaaatcccgaaacgaaaagccaaaagaaaataagcggcagcgaagaatacgatgtaaactgaaggcccgcataagaaatcagtgacagcgccgccgtgatgatcataacctgcttccggccccgcttctcagaaaagaaaggaataaacagattgctgatcagcgctgcgccgaaaaacaatacggttcctaaaaacacaaattccttatggctgacgttatacgtaaaatagtacaccatcgtgctgagcttaatgttaaacccaatcgcaaacgccaaaaatgcagaaaccaaaatgagcaaaggcttgtttcggaacaaaacagacaacgtctttttcattccttgtttttttcttttttcaggctgaatccgttcccgcacagtaaagaaactgaacagattcaatgcgatgctcaccgccgcatagataagcgccgtcatctggaatccaaacgcctgatctttcccgccgatcagatctgcaagcggtgtcgcacaggaaatcgataacagaattccgatataaaccaaaatcatccgagtcgtcgtcagaaccgtccgttcctccacggaattcgtcatccgccccgttaagctgttgaccggaatcgtctgcatgctgaaggacatcccaagcagaatataagtgatgtacgcataaaccatgttccccgtctcgccgaaatggggggtcgtgaagcataagaacgtaaatagcgcaaaaggaaacgccacccacaaaagatacggccttgcctttccccatcttgtattcgtcttgtctaaaatcacgcccataatcgggtcgaaaatagcgtccagcacccttacgataagaaacaaagctgcaatgaccgcaggcttaatgccgccgacgtctgtataatagaataataagtatgcgtttacaaactgaaagataatattgtacgacatatcgccgaatccgtagccgatccgttccatccaggacaggccgcgatatttcgtctttactgccgctgctttttctgtttcaatcatcatttcccaccccaagaatccgttttcatttttgataagcaagagggagaatgcaaagatcctccccgttcactcagcgatttggatacaccatcacttttaagcattcatttttgtattgaaaggcccgttccatcgcctcttgcgtctgctccaacggatattggtccgttataaggtgcttcgtgtccactatgccggaagcgagaaattcaattcccttcggatacgtattcgcataacggaagattccgtatatatcaatctcgttatctgcaataaacggcacattgagcggaatctcgttctgagaaggcaaaccgacaatcgccagttttccgccccggcgcacggaagctagtgcggattgcaatgccgccggattccccgctgtttcccaagcagcatcaacgcctctgccattcgtgatcgttgtgatttcttcaccggcatcctgttcccggacattgatgacatgagtcgcgcccatttttttcgcggcatctaaccgcagcggctccaagtcggtcacaatgattgtccctgccccgtatgctttcgctgccgcaacggccatcagccccacaggccccattcccataatcgcaattgttgatccgggctgaagctttgttctcgcggccgcatgaatgccgacagaaaacggttcgatcaaagccgcatcttcataggatagtgaatccggaatcgagaaaacaaagtcctggcgcattttgatatattggacaaacgcgccgtcaaccggcggtgtcgccaaaaactgtacatccgggcaaagattataacgcccctccttgcacgcctcacagcgtccgcatgtgacaccaggttcgacggcgacacggtctcctattttaaattgatcgacagacgatccgacggcggcaatttctcccgcgcattcatgaccgaggataaatggtttttccactacataattgcctattctgccatttgtatagtaatgcagatcagatccgcaaattccgacagccatcaccttaatcaacacttcatcatgattgatctcaggcacgggcaatgtttcgattttgatttctctcgtgttgtgcataaccgccgctttcatattttgaggcactgtgtgagtcatttggcaaaatcctttctctgctttgaaatgtaagtgcatacatttttgttttcactattactgcccctattttatctgcttttcaagacgtacaacagcctttcctgctgtataaaaggacagccgcactgtactttttattttttcatatacaaaaaacactgaattgataaaatagtactaataggaggtgcaggctaatggctgaacttgaaaaccgggcacaatttgcagaactgctggcacctgccgtcaaatcgctgaaacatcatcctgattataaagtcagaaggaaaaagaacgaaaaaacaggacagtcttatatagatcaaatcgcactccgattaggcgtttcctctaacacgatcaaaagctggatcggacagatgggcgcaaactacattcccggacgtattgacgacggaaagctgttcgggatgatctggatcattcttgaaaaaaccgatatgaatatacagtggtttaccgacctgcttgaaaccacaaccatacctgtcatcaaacctgcattgcctgtatgggcagcatcttgccttaaaaaagcaaaaacgttaagaaaagacggatcattcggttcaccgcttgacgaagatattgaaaaaacagtcaaacgtttatttcctgaggttcccgaccataaaacgaatacgcttacagaacagatccctttgacacacaatttaccgtcacgctggtcgggtcactttataggacgaagatttgacatcgaggcgatacagcaatggatgctttccccatcacccgtctgtttaattaccggatgggcaggcatgggaaaaacgacaactgctctagaagcagcctattcctgtatcggcgattcctcggattggcccgcattcaacagcatcatctggctcagtgctgactggaaaggattaagctttagtgattttttaaatacgattgcatatcagctgggtcgaacggaacaaattgataagtcaatcaatgaaaaacggtttgtcgtccgcaatgcgttagccaattacaccagggaagaaccagtattacttatcgttgacagcgctgataccgcagaaagcgacattctcgaattcatcaccagcctgccccaaggtgtgaaaatcctccttacagctcgggagaacttgaagcaaacattcagagaaggctttggagaaatggtgaccattcaactgagcggacttgaagtaacggatgccctggagtattttcatcaagaagtgcaccgctgcctgcaaatatgcaacgacccaactaaacaagcaaagctagcgcagctgctggaactatctcctgaattgaagagcgagttcatttcagcgactgccggaaacccgaaagccatggcactcagcatcgcctatatgtcagacgatgacattcccgctcaacagctgattcatgagctcggaaaagcaggctactcactattagatctgtttgattttctatttgggcgcacatggcacagatgcaatgaagacacccggaaactatggcaggtgctatgctttttcagcaagccgccagatgaaaaaagtctggcggcagcagctggattagacgctcgccgttttcattacgctgttgaacaaatgcggtcatacgctttgattcagccggaacgaagcaaaggaagaacacagtacttagtgcatcaaaccgttgtcgcatacggagaacagcacttatctgaaaaacaggactttgaaaatgaggcgcgcaggcggtgggcgcattattatattcattatgcggaaacccatttaaagcgggaacagccaaactctatttattggagctatctccttggacgtgatttagaccaaatcaaaacagaatggccaaacatcctaaaggtgatcaaatggtcaagcgaaaccagacaaaatgaaatcctaattgaactcatcactcgcatcagccattttctaagcagaatcaacctgcccttacgaatcgaatacggccgtaaagccgccgacgccgcccatcaattaggcaaacacacgctagaagcgttcttccgaatcgacacagcaggctgggcactcatggaagtcaatgatttagacggggcacttcaacaaattgaagacggactgaagattctggaacaatcagacactgaagagcaagacgttcacgatctaaaggtatggggactcgcactgcaatcgaggctgtttttaaaagccggaagtcatgaaaaagcagaagtgattttaatcgatatcaaagatcaaccgatttcccctgcgattcagcacagagttctattggttcgcggagatctgagctttgtgaaaggtcataatgaagaagccattcaattatacgaagcggcaaatgagatcagctccatgtatgggggcgaaaaaacgatagaagcctatttcaatttgggtatagcttacgtgaagtgtgatctgtttgagaaagcggaagaagcttttgagcagatgctttatgacaaacataacgcgaatcaggttgagttgatttattattattacgggatggcactcctgctgttccgtaaaggcgagcatacgaaagcgatggaatttaatcagaaggcaattcttttgattgattcgtgggagcctgcgattgggattcgaggagaggtggaacaattgggtaaggcgcttgaaggaaatggacgggcttgaggctttacttgagatgaaacaacgatggcctgatatgaagattgtgctcatgacaacgtttgaggataccttgcaggcgtcaactgcattggagaacggggcggaaggctacatgctgaagtcgattcatccgcgggagatgaaggaagccttgaaacttatttataacggtggaacctggatcgaccaatcggtcgctacgcgagttttcgaagagataaagcgtcaacgcgagcagttggagaagatcggctcaagtaaggacagctacccgtacgggcttacgaaacgagaaatggagattctggagcatctgtcaaacggcctgcgctacaagtcaatcgccgcaaagctatttttatcggagggaacggtccgcaattactgctcgaagctcgacgtcaacaaccgtgaagaagcaataaaaatggcgcgaacggagaatattgtgtaggagcaggagaactttttcgatatttctcttgtttttttcaaatgcttcttccccataataatcaaatcgtttatcaaccttaacaagctaaagtcacataatagtagtttgaaccattatagaaatttaaactgtttttcaacaaaaaaagtgcattagtccttcttggatcaacacactagttaaatttataagctccttatatgtttttttatttttaacacgtttcttattaaaccctttttatatgtatcttagtcagaatgtttaatagattaactacaggaatgctatcctgccccgatagttcattacggaagtccaaaatcaagtattgatatcgcatcttttttataaacatcgtgactttatttcaaagctacaaaaagccctcaagttaatttggagggcttagcatgcgttttttccataatcatatactaagtctttctgaattgattaaacatagaagaaactcattcaaaatggaggaatggagaaataacagctgttatgtttatggaaatgttagaagaaaagtagcatctctcctataggaaatgctatttttcctcctattgtaagaatgatggtactccccttaaatatttgctatgattcatgtttggatgaatccttacttctgcttaataggcaaagcatgataaccaaaagccaaatcgagtaaggcactcgcttcttgacgtagtaacagatccttcggacggaaggtaaaggatccgtcggcgtggatggtagtatcagggtctacgattccttgtgaggcaagtgcttgaatggcttggaccccccagtcatccgcagcatcaagcaattttactttaatagctttgtcaggctgaatcggtttcatgtcatgaatttgctttaagttttgaatcatggttgctgcgacctgtcgggtaatcggagtagcacggtcataccctggaattcctttcataattttttcccttgcctccttggagtcgtctggaaaaccgttccatccataagcaagtaacaacgtatccgcaaactctccttgtgtcatgatgtccatcggattgaatagattacctgttttagcacccataatatttagagcatgaagattatcaatgtgacttctatagttactcttttgtggaacgtcatcaaaaggtggtttgttgttaattctctgggcatctgctacaaaatcaaggcttttaggagagttgtagtgaaaatatgcgatttctccagctgaattctttttgaaagcaactttgttgcctttcgaatcttcaaataacaacggatgaatcattttgagaacttgttttccagttgttccaccctccatgaccaaattcccattttcataagtaaaatgagtgcgaattgcagcgaaacgcgtattttggaataagcccaagtatttatgagcttctttttcctctaacgggagataacttgtttttacttcattcttcttagcagggaaatagtgatccatgagagtttcatatatgtctatactcatcattgaatcattattgtaagacatgaagaatgctgttttttgttcaggcactaaaatcagcattgattgatgtccaggcatgcttcccccttttattacaacgtgttgaccgttagcaaattcattaaaaggcgtttcaaatccaattgttgcaacaggaatcgtcttatctgcgaaaacttggtagtcatgcatcatatccatgcttcttttacttacgatttctttacctccaaactttccattctgtagctgcataatcatgtactttgacatgtcttctccagtggacaaaatgcttccttgtggtgcatctgttagaccatgcccacttgttggaataggatcgccagtgggaccgtaatgtgtagccattctcttgagaagatcaggcgtaaaacgtacacttgtagacttcatgcctaatggtttgaaaatattcttttccatatatcgtgagaaagatgagcccgtaacattctccactgcatatcctgcgagtgcaaatgcgaagttgtcatacgtataagcttcaccgggcggccgtaccaccgtcggcatatgtttagagaaaaactccttcatcgggatatcttgattaacgtattctggtccggttattgtagtgatatcgggaaaatccacgccgctggtataggtcagcatatcaaacagggtgaggggttttcctgttttattgggtattttcaatccaccgagatattgttgtacatcttgatctagtttaagctttcctttatcgacttgttgcatcacggccaaggcagtaaaagttttcgagactgaagcaatttggaagaccgtttccttattgacgggaatcttcttttctttatctgcataaccgtaccctttattgatgacgacctttccatcatggacgacgacaaaacttgaaccgtttacattgtactccttcattttttcctcaaataacggatcagcaaaagattctatttcttttgcattattgggagctttcgtcatttggacatcgggcgtggatgtcgatggttttgattctccaacttctgatgattgtggggaacatgcagaaatcatgctagtagaagtgagaagaattgcgagactgagtgtattgattgcttttttcattttcggactctcctttgtttgactgaaattttcttgtcagcacaacgagtagtcagctcgtcagtgtataaaccgagtgtagcaatcggaaagtcatagtagctagtgacctttcgtcatcttcatgcatgacataaaaaatagagcgtagtacggatagttttatagtcatgacctataaatcatgacactttgacactaccgtatgtgacaggcgaaaagttagaatcgaagagcggctcataacgtattagtaaagaaaaaggaggagaaactctaatgtcgaaagaagcagctcaaaaaagtttgcaagatttctacttttttttgtttaccttcggatctggattgttttacttttgcttctatttggccagcattacatttgcactcgtgatgacagttatcttcgtaggtattcccttgttagcgagtgtgttgcggacaactcacacgtttgtccagtatgaacgtattcagacgaaggtttatacggatatatcgatagagccaatcctaccaaggacaaaaagtggaggggataaatggattgaagcgaaagaagcaattcttaatagtaacaattggagggctattttttggctcatgcagaagtttcttattggggtaattagcctcttatgtgccgttatattgtatgtagctccgcttgtatttatcgttacaccgttactttttcaatatcttgatgtatatttattaggaataactgtgaattcatggaaggaatctatatgtgtcatgatcgctgggggtattctctcctggatacgtacttgtattggaaacagtttagttcaaatgattggaaagtacacgatttccatgttcaaagctattaaggggtgatagtttgtttgggattttgaaacaatggttttggtatgactgggtattactttgtatacgttttgtcatctggctctcaatgatgttaactactatccaacatcaagaccatttgactgtgccactttggatcatcattctttgggaagtagcctcattttcagtaccttggatttgtttaatgttcagttatcgctattatttgtttactgagataattttgtttggtggagtttgcttctacttaatcttattatttccagcggcttatcttgcttttttaatgccgactttcatgatcgcggcaaatagcgcccataaatcataccgttggtcgggttctatcacaattgttttgtttccgtttctcattgcaatattttcccgtgaaatagatgtatgggtgattatcctacaaatgggtctggcttttgcaatgggattttcctttcgtttactcgttgttaattaccgtaacaatgaaattattcgtaaccagaagcgtgtattggaacagtatttatcccagattgaacgaattactttgctagaagagcgtgatagactctcaaaagatttgcacgatacgatgggacattcctatacctcaatcattatggggatggaaacattacgtacggaattaaagacaaaagatggggaacaaaagcttgactcattattgaaattggcccgtaacagtatggcagaagtgagaacgtatttacatcaaatggattcacaacaggaagcacttccgctaattgttaccttgaaacaattagcggaagagtttcagaaacatgcaaaagtaaatgtacgcactcgaataataggggaagagtacacggtccccaaacaagtgaaaatgacactgtatcggagcttgcaggaagcactgactaatgctgtgcgacacggacaatccaccgaaatcattgtgtcactgcattttgagccgcaacagacgagattggatgtgcaagataatggctgcggagtggaggaatggaaagatggcttcgggttaactgcgatgaaagaacgtacggcacaattacaaggtagagtcactatatactccgaaaaaggcgaggggacgctcatctcatgtgcgttacctaggttggaacaattatccaatgaacgaatccgcttgtgtatcgtcgatgatcattcgtttattcgagaaagtctctatacaatcttggatgaacagaaggacttgcaggtagtgggcatggctgaagatggagagcaagctgtagaattgtgtggaaggctgaatccagatttggtattaatggatttggagatgcccaatcaggatgggattcgtaccaccaaaataatcaaggggaagtggcctgacattcgtgtcctcatcctgtcaacgtttcaggatatagaaagggcgaaggaaatcatacgaagcggcgctgacggctatctgctaaaatccatagagtcacgtgaactagctgaatcgattcgcctcgtctatcggggagccactatgattgaccaagatttgttccatagaatgtgggatggaaatgatgaggcagagccagccggattgaagttagatggaaaagagtatggcttaacgaaacgcgaactagaggttttgaatcttttgtctcaaggaattcgttataaaacaattgcttcggaactttacttatcaaacggcactgtaagaaattacgcttccactctctatgataaattgggagtcaaaaatcgagaagaagccgtgcaaaaggcaagagatacaggattactttcataagagggattactttcatctgctaggggtgtgtgaacgttcaaggtttcaggggaccacatgtcaaaaatatgtgttataggcgattttacagcttctataaataatgttttgtttttgttataagtttttaagtaattcatgtttaattttcaatgaatcatataaagatataaagacaagcatattacaccccatagctttagacatactcatacatccccttctcattgaagctggtgcaggcgtaaaggagattcaagaaagattagggcattcagacatcaacacgacgatgaatatttacgctcatatgacaaaaaatatcgaagaaaagacctcccataagttcagtgaacttacgaaaggtcttctctaattggtgaagtaaatttgtttcaaaaactgaaagttagcaaaaagttagcatttcactaatctccaccttccaaacccctatatatcaagggttctaggcgatgattacatcatgccgcccataccgcccatgccgcccatgtcaggcattcctgcgccgccggcgttttcttccggtttgtcagcgacaacagcttcagttgttaagagcattgctgctacagaagctgcgttttgcagagcagaacgtgtcacttttgtcgggtcaacgatacctttttcgatcatgtttacccattcgccagttgcagcattgaagcctacgccgattttttcgtttttcaggcgctcaacgatgacagatccttcaagacctgcattgtgcgcgatttgacggatcggctcttcaagtgcgcgaagcacgatgttgatacctgtttgcgcatcgccttcagcttccactgcagcgactttgttgtatacgttgacaagcgctgtaccaccgccggatacgatgccttcttcaacagctgcgcgagttgagttgagggcgtcttcgatgcgaagtttacgctctttcagctcagtttcagtcgcagcgccgactttgatgacagctacgccgccggcaagtttcgcaagacgctcttgtaatttttctctgtcgaattcagaagttgtttcttccacttgagcgcggatttggttgacacgtgcagcgattttttcagtgtcgcctgcgccttctacgattgttgtgttttctttcgttaccacaactttagaagcgcgtcccaattgtccgatttcagtagatttcaggtcaaggcctaagtcttctgtgattacttctccgcctgtaagaacagagatgtcttcaagcattgctttacggcggtcaccgaagccaggagctttaacggcaacagcgttgaatgtgccgcgaagtttgttgacaacgagtgtagcaagagcttccccttcaacatcttcagcgatcagaagcaatggtttgccttgctgtacaacttgctcaagcacaggaaggatttcttgaatgtttgtgatttttttgtctgtgattaagatgtaaggattgtcaagaaccgcttccatcttatcagagtcagtcaccatgtaaggagacgcatatccgcggtcgaattgcataccttcaacaacttcaagctcagttgtgaaacctttagactcttcgattgtgatgacgccgtcgtttcctacgcgctccattgcttcagcgataaggcttccgacttcctcatcagcagcagagatcgcagcaacctgagcgatagactctttgccttcgatcggcttagaaatttcttttaagttttcgattgctacagtcacggcttgttccatacctttacgcacgccgacagggttagcccccgcagttacgtttttaaggccttcgcggatcatagcctgcgcaagtacagtcgcagtcgtcgtaccgtcaccggcaacgtcgtttgttttgctggctacttcagctacaagcttcgcacccatgttttcaaacgcatcttcaagttcaatttcttttgcgattgtcacaccgtcatttgtaattaacggagaaccgaattttttctccagaaccacgttgcgtccttttggccctaaagttacttttacagcgtcagcaagcgcatcgacaccgcgaagcatagcgcggcgtgcttcttcactaaacttaatatcttttgccatgttaacgaaacctcctcgaatttttaaaaatatttatttgcttagccgattacagctaaaatgtcgctttcacgtaagattaagtattcagtaccttcgtatttcacttcagtaccggcgtattttgagaagataatgcggtcgccctcttttacttctaaagcaacgcgctctccgctttccaacacgcgacctgaaccggctgccacgattttgccttcttgcggcttttcttttgcagaatccggtaatacgattccgctggcagttttttcttcagattctacgagttcaatgacaacgcgatcacctaatggctttaacaatgtaataacctcctcaatagtatgaatatgtaattttagcactcagctctaaagagtgctaacacagttattataataaagaatctcacttccaatttcaagtcataagaataaaaaattttcacgcttacatgattctctctcacactgattttctccttttttcacgtcaagttcacttgtgttacaataagaacaaataagttgattttataggataaaggagtacatatcatttgagaaaacagtattggtatatcattttgacatatgttatcatgcagctttccgcattgatcggcattcctttaatgtacaaattcggctatgcgggcgggcaccctacgaatgcgaatctcaccatggctcaggggatttattccgtcgtaagcttttttatctgcctgattatcgttctcttgattttgagaaccgcgccgaagcagacattaagaaacgggaagaaagcatccgccggcatgtccgttctctgggcggtcgcgggaatatggctcgctttattttctcagggaatcgccgggatgattgagcagtatgtctttcatgtgggcagcggttccgaaaacacgaaagccattctcaacattattaaagccatgccgctcatgattatcgtttcttctatcgtcgggccgattcttgaagaaatcattttccggaagatcatcttcggtgtattatatgaaaaaacgaatttctttatcgccggactgatcagttccgtcattttcggcattgtgcatcaagacctcacgcacctgctgctgtatacggccatgggctttacctttgcgttcttgtatgtgcagacgaaacggattattgtgccgatattcgcccatgtcatgatgaataccattgtcgttgtcatgcagctcggccccgcccaaaaatatattgaacagcatagtgagcaaatgcaattaattattggaggattgtttgtatgaggaacccaatgacttggggcttgatttatttcgcagtcggctgtatctttacgtatttggccgcaagctctccgggaagcatgtggtctttttattccatactgctgatggttttcgccgcttataatatcagcatctcgtttaaaatgttcgccttctcatttaaagtgaaaaaaaatcaaaaataaaagaaaagccatttctcatcattgagaaatggctttttttatgctgatacgtcctggtcagattcactgccggtctgtcttttccgatacgccgcttttgaaatcaggatactgatctcgtataaaatgcaaagcgggatggtaatcatcaagtgagacagcagctcaggcggcgcaatcatcgcggcgatcacaagcagcacaaaatacgcatacttcctgatcttcgataaaaacctcggcgtgataacaccgagtctcgttaaaaacatgatcagcaccggcatctgaaacagcagtccgaacggaatcgtcagctgcagcagaaaatgaaagtattcggtgatcccgatcacctggttgacatcgaggtcattcgagacccgcttcataaaatcaacgaccagcggaaataaaatataataagaaaacgacacaccgccgacaaacagcacgatcgaaatcggaatatagctgagtgttactttgcgctccttctcatacagacccgggctgacaaacgcccaaatctgatagagaataatcggcgaagtcaaaatgatgccgatgataaacgcgaactgcaaaaagataaacagcggatccgtcaggttaaaagcattaagggtgagctcttttacttcatcggctttttgaagatacacaatgataggttttgccagaaaaaagccggcaataaagaaaaccgtaaaggataacgccacaatcagcaatcgtttccgaagttcggcaatatgctccacaagcgtcatttgattcactctcatacgcgtcatcctatcttactgttcttctttctttttttcctcttcttcaccggctaatcccttagtagcgttcttaaattcacgaagcgtgtcccccgccgcttttcctaattcgggaagcttcttcggaccgaaaataatcaccgccaccacaccgataaccgccaggcttccaggaccaatcatgtgcagctcctcctttcgctattcaatttcttccaaaacagaataatgctttaagaaataaaccaatgattgaagctctacagctaaatctatatgatgaattcgaatgtgatccggcacattcaaacgggccggcgtaaagttaaggattcccttgattccgagcgacacgagccggtcggtgattgactgggcggcaaccgccggaacggtaagaatcgccacgggttcatccttaatgtgaagctctaaatcattaagatcaaagacaggcacaccgcctacctcagttcctattttactctgattcacatcaaaagccatagatatttttgtgttattattttttgtgaaattatagtgaagaaacgccgtccctaaattcccgacaccgatcaaaatgacgttcgtcgtttcatcctgatccagtgtttttctgaaaaatgacagcaggtaatccacattatagccgtatccttttttgccgagcgccccaaaataggaaaaatcccggcggatcgtggccgaatcgacttttaccgcgtcgctcagttcagctgatgaaacgcgctgctttcctgacgcgtgtaaattctttaaaaagcgataataaagcggcagccgttttgccgtcgcctgtggaatttttgattgatccttgttcatgattggtcctccactttatactcagatgcatctcttttaaaatcaccgtttttgcctcctgttttttccatgaggcaggtcgggccgatgaccattcctttatccagcgccttgcacatgtcataaacggtcaaagcgcagactgaagcggaagttagcgcttccatttccacacctgtactccctttcgtttttacgcttgcctgtatatgaagaacggcttcggaatccttttcctcccagccgaatgaaatgtcaacgctgcttaaagaaagcgggtggcacatcgggataatcgctgacgtctgctttgcggccataattcctgccacctgtgcgacagccagcacgtctccttttccgatctcgcggtttttgattctgctgtacacgtcatgcttcatgtgtacgctggatatcgcagcggcagtacggactgttgaagatttatcgcttatatccaccatgcgggcacggccttcttcattaaaatgagaaaatccattcatatttaaactctccttacttctgatcatacactattttctccctgatgtcttatcctataatgttccaattctgatgtattgtttgctgacagcaggttgataagctacacttaacttattataacagaggtgaaataatatgatgatcttacaaattaatcagctatccaaatcttttggcgctgatcctattttaaacaatataaagcttgaagtcagatctcgggatcgcatcgccatagtaggcagaaacggagccggcaaatcaactctccttaaaattatcgcaggtcacctttcatatgaaaagggtgaattaatcaaaccgaaagaattaacgatgggatatcttgcccagcacacaggcttggaatcccagcttaccataaaagaagaactgctgagcgtttttgatttcctgaaagcaatggaaaaagagatgcgctctattgaagaaaagatggccacggccgcccccgcggagcttgagacgctgatgaaaacctatgacaggcttcagcaggatttcaaggataaaggcggctatcaatatgaagcggatgtccgatctattcttcacggcctcggcttcggaaaatttgacgattccgtgaaagtgcaaagcctgagcggcggtcagaaaacaaggcttgcgctcggaaagctgctgctgacccagcctgatctgcttattctggatgaaccgacgaaccatctcgacatcgacacgcttacatggcttgagcattatttacagggatattcaggcgcaatcctgatcgtttcccacgaccgatactttcttgataaagtcgtcagccaagtgtacgaagtctcacggacagaaagcaaaaaatacctcggcaactacagcgcctatttagaacaaaaagccgagcagtatgagaaagacctgaagctgtatgaaaaacagcaggacgaaatcgccaagcttcaagattttgtcgaccgcaatctggccagagcttctacaacgaaaagagcccaaagcagacgaaaacagcttgaacggatggacgtcatggcaaagccgctcggggatgaaaaatcagccgccttccgttttgacattacaaaacagagcggaaacgacgtcctgcgcgtacaggatgtttccatcagctatgacggccagccgccgctcttgaaaaacctgaccttcggcattacaagaggcgaaagcgccgccctcgtcggaccgaacggaatcggcaaatcaaccttgctgaaaaccattatgaatacaatcagtccggaatccggatcgatcacgtacggttccaatgtcacaatcggctattatgatcaggagcaggctgaactgacctcgtccaaacgcgtgctggacgagctgtgggatgaatatccggacatgccggaaaaagagatcaggacatgcctcggcaacttcctgttcagcggagacgatgtcctgaaaccggtccgctcgttaagcggcggggagaaagcaagagtcgcgcttgccaagctgatgcttcaaaaagcaaactttctcatccttgatgaaccgacaaaccaccttgacctggacagtaaagaggtgctggaaaacgccctgatcgactacccgggaacactgttatttgtatcgcatgaccgctactttattaacaggatcgccacaagagtgctggagctgtcacctgatcatgcagaagaatatttgggagactatgactattacactgagaaaaaagcccagcagctggaactggaagaaatgaagcggcaggaaaaggagcaggctcagcctgccggcaaggtcaaacaggatacgaaaagaacttacgaggaagaaaaagaatggaagaagaaagaacggcagcgcctgagacgcattgaagaaatcgaagcggccgtctcatccgccgaagagaaaatcagcgccaatgaggagctgctgtgcgatcctgacgtgtatcaggatcatgaaaaggtacagaccattcacgcggagaatgaagctctgaatcaagagctcgagaacttattagcagaatgggaggaactctcctcaaaagaatagaaaaagtcaagcacctctttaaggggtgcttttttatccacagctatcctccttgccagccatgtaagtaagcgttttatacacactatccacaaaattttctgactttatccactttactaacaacttatagccccttatccagcctggatttctgaatatattcacaatcctgtggatatgttagaattgtctgttaataagtggaaaaaagcctcacgttttacaacgtgagacgatcaaaagatgttaattccaaaccgggctgtccgttcatatcatatgagccccggatccccttttcaaaagcaacggttccggcagccgcaatcatcgctgcattgtccgtgcataaggaaagcggcgggatgataagctcgggatctcccgaatggctgaattcctgctgcagtgcggctctcagccctttgttagcggctacgccccctgccagcagcacttgtttaaccccgtattctttcgcagccttagaggtttttgccgtcagtacatcaatgacactctgctgaaagcttgcggcaagatcctccggaggaatcacctcatttttttgcgaggcgttatgaagcgtgttaatcacagctgacttcaggccgctaaagctgaaattgtaagacccttcttccagccacgcacgcggaagcggaatggaatccgttcccacagcagccagcttatcaatctgcggccctcccggataaggaagccccatcgttcttgccactttgtcgtaagcttcgcctgcggcatcatccagcgtttcaccgataacctcgaatgaaccgtgctctttcatataaaccaattccgtatgtccgcctgacacaaccaaagcaagcgccgggaattgaagttctcctatcagcctgtttgcataaatatggcccgcgatgtgatggacgccgactaacggtatttgatgggcaaagcttaaagcctttgccgcattgactccgattaacagggctccgacaagtccgggtccttccgttacggcaatcgcatcaagatcatcaaagcccatctccgcttttgaaagagcttcctcaatcacaagggtaatctgctccacatgatgtctggacgctatttcaggcacgaccccgccgaaacgtttatggctttctatttgagaagcgacaacgtttgaaataatttcattcccgttttttacgactgaggccgctgtttcatcacagcttgtttcgattcctaatacataaatatcttgtttttcactcatgtaatgtcacccacattaataacgcatcttccccgttatctgtatagtattgttttctgattcctccggcctgaagaccgaattttttatataaggattgggcgggatgatttgagaccctgacttcgagagagagccttcttgcctttttttctctgcacaattctatcgcagagcgaaacagcgcttctcccaatgattggccccgatattccggcttaatggctatgttcgtaatctgcgcgtcatctataataatccagattccgcaataccctgccagacagccgtccttttcaatgacaaggtagtgggcatacggattttccaaaagctcatgataaaatgaatccttcgtccacggagaagtaaaggatgctgtttcaatttcataaatttgatcaatatcttccggccgcatgcttcgaatcgccgttttcgttttcatccctatcaccctatttttgagattccatccatttcgcttcagcttctgccagacgcaaataatccggaacaaggctgtggacatccgcttcttctttttccaagcctaaaaacgccagctctgacggccgcggattatgctgtgcagccgttcctatcactgcttgagatgtcagctcatgcagaatggtttcttcatgaatggctgtatcgtgccctaaaaataaaatcggagacgctttttctttcagcatgccgagccaatcagtcaaaaggacattctgatcaggaagaacggattgtaatcggccgtcctgatattcataaagtcccgtatatacctgtccgcgccgggcatcaaataacgggcagatcagtccttgaaagtgccgtccgttagccgccagcacctccagactcgagacagcggaaaccggaagcttcagcgaccatgctaatgtttttgccagtgtcacaccgattctgacacctgtgtacgatcccggtcctttcgccaccgctatttttgtaaggtcctgcggtgttaggccgcaatcctgcagcaatgaattgacagcaggcatggcccgcacggaatgattcttttttaaatatgtaatatactccgccatcaccgttttgtcacgaacgagcgcggcacccaacgtgtaatttgacgtatcaattgccagtattgtcatgtttatttatctcctcacaaagcgtttcataccgtgttccgcaagccgtaaaggtaatgtcccttgcctcatcaccggctcttgtgatgacgatctgcagccgttcagcaggcagctgatcctgaattaaatgagcccattcaattaaacagacgccttgtccctcaaaatattcttcaagccctaagtcttcgctttcatcctccatacgatacacatccatatgatatagaggaagcgaaccgtcatggtattcttttataattgtaaaagtcgggctgtttaccactctcgtgattcccagtccttcggcaaaaccctttgtaaaagtcgtttttcccgcgcctaagtcgccttccagtgtcaaaatgtctcccggctttgccaaagaagcggcaagcttggctacggctttcgtttcttcggggtttttcgttctccattgtaatgtcttcaaagtgagtcacccgtcttatttaaaatgattgtatccttttttctcaaggacgatttgtctctgatcattggctgtcaaaagaacacaggcttccttccgttcagataccgctcctatcttcgcaatcggaatgcccgattgagtgcagtaatcaagcagggaggtccactcttgctgagaaaccgttccaaccaattcaaaatcttcaccgccgaataacacccatttttcccactcagaatctgcctcaggcaaatccggatgcaccggcagaagttgttcttcaatttctatcgtaactgaacttgccgcagctatttcatgcagctcactggccaatccgtcactgatatcattcagagccgcgcgctgaagctgagagcagaagcggccgacctgaactctcggaacgggccgtttatgttttcggataaaataatcactcgtatgaaaagcagaagggagtgtttctcccaataaaagagacagtcctgctgcagacgaaccgatatcccccgtaacaaacacaacatccccgggtcttgccgagcttcgcagacaagcgcgatccttctcaatttctccgatgacagtaacggtaataacagcttgaccggaagcggagacggtatctcccccgatcaaatccatttgatatagtttcgccagttccgccattccttcatacattgcctggacgtcagctttctgccagcaagaaggaaccgctagagacaccaaataaaacttcggaatgcctcccatcgccgccacgtcactaatgttaacagcaagcgctttataaccgatatcatgaggagaggaatactctaatttaaaatggacattctccaccattgtatcaaggcagacaatttgctgcatatggggtgacgctgtataaaccgcaccatcatcaccgatccctacatcgacggaaggatgataatgcgaatgcggcgtaatactgtgaatcaaatcaaactcatccatatatctcccgtctccctttctgacgctcttgtgaaatacagctctttctagtgtatcggattatgtttcaatatccaagactttaacgatataaaagaaagcttggttagataccaagctgccagcatttaaaagaaaacacaaaaaaaaacgaaaacatgatcgtttcgtttacaataaaaatggcggtccggacgggactcgaacccgcgacctcctgcgtgacaggcaggcattctaaccaactgaactaccg

SEQ ID NO: 35 - DNA, 60330 bp, Bacillus velezensis
  source 1..60330: mol_type = genomic DNA
ttttgaagcttctacttcagttccttcattcagctgttgaagttccaatacatctctcatttggtttcacctcctttcaagtactctttcttagattatgcttcatctctcattagcaatgattgctaagggtagataatgtaactgaaatagttgttagagtaacagtccatgccgtaggctctacttcagacttttcatcaaattgttgaagtactagcacctctttcatgttcttttctcacctcccttcataagttctgtatattaaacactttaattccaatcttcaatgattatcatcgaatataagtgttagaattttaattatttaataacaattcttttttagtctttcttaagaaactatcaatttttattattggcaaccaatataacggatttgaaaactggatagagtttatgcccaatattatgccggcacttccggagtagtaatcatcggctaaacgaaaactgaaattcccagggaataatatttgatcatctttacggataagaaacaattctagttttttcattgccagctcaatatgctgactgatttcgtttttttccttagtcattggcgggattaacaagaaactaccgatcccatcaaacaatccaccgctatatgcgatccttactttatttaaattgattatttgctctaattcttctctaaataaattagtgtctcttacataatttaaataccaaatagcaatccctattccgattgatcccccagataaatagggtaataatcgagggttttgatcatcataagtttgcaaagtattcgtctcttcatctaccttacagtgttttaaatctcgctcaatatattcttttgatttcaaataatatttttcattgttagtgactgaatataatgccgcatagaataaagatattcctgaccaaccatcaatcaaacctataggtactgctgcaaaatcagtaactgataattcatcatcttcaataatcctattttctatctgatcagcaattttttcagaagtaaccaaaagatcatcattattttcttccaagtataagctaattagtgatagacctattcccgacagtcctgaccttaatgaaatatctttcatatcttcatatgacagattattgaatatgtccacagcttgctctgtgtatcccaattcatacaatgtgactgcgataccagcttttcctgtaaataacccaatatcatcattaagtacattcaaattttcaagtaaaacaatctcaatccaatcctgaactcgcttgttgatgtttccagatctgtacaatgccaatgcagctccagttcctccagttagtacatttaactttccagatggcattacaaattggcgtacatcgccatgaattagcgagctattgggtaaaatattactctctatattttttctcaatcctttaataatttttgacatgtccatttctttttgtattttactgtcataattattgttgaatctcttttctttggtatcagataagtatttgtcgcatagattttctgtgtttacaacatattgatagacatctttgccaaactcctcctctatccacatatcatgtttcttttttatagtttcttctatatcaacaactggacctattggcagaatacaaaatcttaaaactttttttagtgcataccaatctcgctccttatgatttttatttttcttatgtgtgtagccaattgtttgcaacgctccattttcttcagagagagcactagcagcctcaaaatcaataatcttaacatttaattcaggggtaatcattatattttggggttgcaaatctcccataccaacatttttactatgcattagtttaattgcttttatcaagctgttaattattttttttaccttactaatgtattcgtttttatcagtctcaacgttgaacggataattgattgcacaccatgattgaagagttacaccttctacaaactcttcaactaaaaacacatgcttccacgctttaaaataatcaagcgctttaacaacaccttcaacttctgtcagtttatttaatgcttcgtattctatattcaatctatcaattgcatcattatattgaccatctaaccctactttaggtcttccttctttgattactactttttttccatctgatttccttattccagtatatataccgccaccattattaaacctaaggactccttggaactcataatcattaaaattacttacatcttgagtatctaataagttattcttggtatctaaaaactgatcaaaatcacttacgaaatcaggtattttataatatggattcctattatctggaattaaatttccgttttcgtctttaatgcaaagttctcctctttcattgtaaatattcttaaatgcaccgtatcggtaatatatattactatccttccacgatttgtcgttcagtatgtatggcccattctcataatgttttaattcttcataaagttcatttaataaatcgaagaacatgttattagaggaaggatatatagcgataaattttccagatgaagttcgattaccatgctttgaattcatattaaatagagattgtttatctttaatatgtttaaatgggatctgatgtttgaacataatttgacttacaactttcaatatatcctgagcattattcattgtcgcacttacgtgtattttccagccttgttctttaaggttatgatttggattattataaaacttccacggtgatttatattctgtactaacagtatagtgattcgggatattatgtacttcgtatggatcagtctccgcatttgggcttttctctatatagtattttgaatcttcactcatgtgttggaaataaactaattttttgtccattttgttttcgcctctcttaagcgctcttaattggttaatactaatggatcggtactatcttctttaaactgctgctcacagaattgatgatacaatttatgactgcgctttaactcccaatgattcccttggcctgttacctcaccgttttccataaaaatgatattgtcagcgtttataatagtggataacctatgtgctattataatagcggttctatccttcatgagcttcttcattgcttcgttcacaatttgttcagaatgactgtcaagactagcagtggcttcatccaaaaagattatatttggattcttcagaaacattctcgcaatagcaattctttgtcgttgtccccctgataaattcagacctttttctccaatattagtttctaaactgttaggtaattcacttataaattgccatgcatatgccttcttacatgcttccactattctgttttcatttggggtattttctaaaccaaagatgagattgtctctaacagtaccgcttattaaatcatgattctgagctacatatcctatttggctacgccatgattttaatgaatataactcaatattctcttcaccaaaataaatacttccgctattcggcttgtagtatctttccagaatagagatgattgtggttttaccactaccactaggacctactaaggcattaacacttcctctttttattactaaattaatattgttcaaggaaaatgctttatcctctttaccatagcaaaatgataaattttcaatcactagatctttataggtttccgctaattcttttcctttatgctgatcttctccttgctcatatatcaattgcgaaattctttctgttgcacctatcgtcttttgtatttgagtaaagaatagccccaaattattaagtggacctatgatatagaacataagggttagaaatgctataaacgttcctggcgataaacttccattggctaatttaacccctccgaatccaatgatgctgataatgataagcatcatcattaaattaatgatagggtttaaaataaccatccattttgtctgccttaggcctatgtttcttaaagcttcaatatcatctcttcctttttccacttgtagtttttctgcagttgaagatttaattagtcttattgaggatattgtttcaacagctcttacatttaattttcctgttaagctttgtgtcattttagataatttagataaaattcttcctaaaggtataaaaatcaacaaataaattggaattgctactataatcactagtgtcaattgccaatcatagtaaaataaccaaaatccacaaaaaagcactattaatatagcattgataaattgcgaaaaagagttacttactaagttataaatcaccgtagtatcattaacaaatctacttgctatgtccgcagaacgattcttatcgtaaaactctacaggtagtataactatcttttcccataataaatttctgagatttgcgacaacattatatcctactacacttaacatataactaccaactgctccaattattccgctactcaaaaatatccctaatagtcctaaaagatcccgcaaattgatcttatcaagaatattataattgtctattagactttttaaataatgaggcactagggtagaagctattgcgcttaatccacttaaaaatattgccaatataaatagtcttatattcggtctggtttttctcagtaagaagaaaaactctatcgatttaaattttgggctggtcatcattttcacctcttccgtttattgcaatatttttttatattgaatgactcttgaatgatatccgccatacctttcctaatattcttataaataatatttcacacataataactgtaagtcaatatataattttacaaattagaaaaaaacaggtctttggttttacattcttctactcatatctattatgatgtgtatatttactcttggtgattttcacccacaaaaccatatgtacaatatacaagattaaaaagaacttaatttaatcacactaaagggggggttttttgggataattacggataatgagaaaaacatgcattgactgttctacttaaattttgtaaaattgaatcaaaaatacttatatataattttttggaatatgggtatgtttagatgtatcagggagaaggagtataaaaaatgaagaatttaagaagaatttcgatggttttcatacttttatttgtatccagcttgcaacctattagctctcatgctgaagaatcaaattatgatgaatctatcataattaacctcgactcaaaagtaagtgaatcgacaataaacaaggttaaggataggtattccaatataggaacaaactatattaaagaattagatttattggtaatagataatataaaaccaagccaattttcagcaatcaaagatattgctaaagaaaaattagacgcaaaagaaattattgaggataaagagatttctcttcctagtaaacagctatcttctaaattggcaatttcatcacaattcacagaagataacgacactctttatgacagttggttatggaatatcaagcaagtaacaaatgattatcgaagttatcgtataaataaaggatctcataatacaaaagtaggagtaatcgattcaggcatagatttcaatcatccagacctcaaaaataatattgtagatactggagagtcttttgttccagttgaagataatacacaagacttttatgggcatggaacttctgtggctgggataattgctgctaacggggatgtaaaaggagttggaccaaatcttggtttagtgccttataaagtattcgataaaaatggtaaatctaaaactagctgggttataagcgcaattgttaaagctacggaagatgatatggacgtaattaatttaagtttatctactttcttatcaaaaaaagataaagaagatagagagactataaaactttttgaaaaagcttttaaattcgctagaaaacacaatactttaattgttgcagcagctggaaaccatggatatgatatttcaaattcaaaaaaacttgcacaacaactaggtaaaccaaaggacaatatcctacttcttcctggtggagataacgatgtaattactgtatctgccaccacagcacaaaatacaaaagcttcctactcaaattacgggaaaaccatctcgattgcagctccaggtggtgatcttgacccaagttttttggatacaaataaggttgatctatatagcttggtatggactacttcccctgtaaatatcccgcaaactccgctaagtaagtcactgggctttcaaaagggatatgaacctactttagggacaagtgtagcagctccaatagtaactgctacagcagccctattaaaaacagaatactacgaaaaatacggagtggagatgtcaaatcgcaaagttgagaaaaacttatatcaaaacacagaccactttgaaaacttaaataagaatgaagtaggtagcggtatcgtaaatgcttacgaatctttgcttaatattgagagataaaagtattaagcagttatcgaaactccactgtaagatactttgttaataaaaagatactagacgataatgatgatgaagctagagatgaaataaattgtatttatgagatattgagaatactaaacaagtgatttcacaagcaacttactattactaagttgcttgtgtcatattttatttcagactgagtattcgattctttagctacaagcttgttgatttttttaatcgcactaaacccagcatttaacagcaccttataaacagaccaatctttccttgctttgatctattttcaatagccatataaccttccttagcctaaagccctttaactttcctctactttttatgtaattttgtgtacagactaatattcattaggaaccatgatttgcaagactcactctagttggtttttcttctctttgtagaataattcttactgcttctttagcagccccaaacactctttctctctcttcccaatccacagtgcttttcctctctttattcggcttggttctcggtgttactttgtaatactattcccaatcatacttaaaaatcacgtttgcagccctttgctgtcctactcccaatccagcaattgtctcaccaaaataaagaacagcgatacttgtagcaagtagtgttaaacgaaaacaaaccacttcaataatccaattatcagacattcatttcataatcatagtaaacaattagctatttaagcacataaaacaatgcatctgtcgtaggatagatgcaaggagaagatatgacaagatatagaaaaatatcagactgggttaaacgacaaatagagaatggcagtttaaagcaggaaattaattagattctatctaggtaattgcgaacaactccaatgcacaaaaatacagttgcaatggttttactaaaactagggcgataaaactgagaaaagacagtcaggacaaggtctgcacatgaaaagacccggaaatcggaattgtttaccgaaatccaggtctgaattgtttattttagttagacgatttcaaaacaagcttcgccacagcttccacatgagccgtctgcggaaacatatcaacaggctgaatatattcgacgcgatagtccttcgacagcgtctgcaagtctttcgccagtgtggaaggattgcaggatacgtagacgaagcgcttcggttttacttttttgatggtatctaaaaatgttctgtcacagccggttctcggcgggtcgacgatgaccacgtcagggcggaagccttctttcgtccatttcgggagccagtgttcggctgttcctgtgacatatgccgcgtttttgatgccgtgttttttggcgtttttcttcgcatcgtcaattgattctttaatgacgtccatgccgcggatctcttttgcgccgtttgaaacccacatgccaatcgtaccgacgccgcaatacgcgtctacgactttttcttttcctgtcagctgagccgcttgtttcacttcgtcatacagcttgaccgtctgctcagggttgagctggaagaaggcgcgggcgctcagttcaaatgacacgtcaccgagcacttcttgaatggcatggcttccggccagcgcttttgttttgtcaccgaaaatgacggatgtgcgcgcgccattgacgttttgaataatcgatttcacttccggcagacggttctgaatggctttgacgatctcgtctttattcggcagtgtctctttcgcggtgacaagcacgacctgcacttcgcctgtttcaaaaccgactctcgtcacgatggtgcggacatcgccttttttggtccgttcgttataaacggatacgttgtgtttttccaaaatacggcggacgatacccgttgttttgtttgtcgccggatgctggacaatgcattccttaatcgggacgattttatgggaatcaagtccgtataagccggcaatgatgctgccgctttgcgagcgtccgacttggaactggcttttgttccggtaattccaagggttgtccattccgatcgtatctttaatgttcatttcttcgacattgaatctcgtatgacgttccagagactgaatgacgatgtcgcgtttttcgcgaagctgctgggtgtatgccagatgctgaagctgacagccgccgcactggtcgtagaccggacatggcggcgtgacacggtgttcagacggcttgcggatttttttgacgcgtgcttctgaaaatttcggctgcacatttgtcgcttcggcaacgacttcttcccctggcagagcgccgggtacgaagacaacttttttcttaaaatagccgacgccctctccgttaatgccgagacgtttgatggtcagcggaaatgtctgtccgattttcaattcggcaggcgcctttttttgatgttgattcacgtttttttctctccgtttctatataaagccttcctcatgggaaaacggctgatttgaaatatcacatcttttcagtataacatgcagccggcggttccttcatgtttttcactggaagtttccttttttcattcaatgcttctccacaagtacaaggacgcatagcttaaatacggcgcccattcgctgcttacctggagcatcacgtcttttgacggtttatcctcaagggcgaagcggcgtttgacggcgttttgcaggccgatgtccgccaaaggaaacaggttcggacggccgaggccgaacatgaggacgttttggacggtccacgggccgatgcctctgatggcgatcagctttttcataatgtcttcatccgataaatgagaaagttccgccagattgagcgctccgtctgcaatcatccgtgaaatgtcaatcgcatattccgcttttctcatgctgaactggagctcccgcaagtcctgataatcaagcgccgcgatcgttttcggctcaggatagcaccagacgccgtctttttgttcaccgaaggcatggacgaaccgttccgttaaagtaaaagcgaaggacaggttgagctgctggtggatgatgcatttcatgagacagttgtagacgtcatattccaagacgagcggagttcccgcatgctcctcaaaaagcgccgacagatttgtttttgagaaatgatcaagcacaggctgaagcggctgctcccactgaaaaatgtgtttgatccgttcaatcatctcttcgcggtccgtttctccgctgacgagaaaaaccgggtctgcggcggtgccttccccttgaaccgtgatgacggacagtttgccgtcccgtgttctgaacggcactttgattgatcttgctttaagatcgaccgcattcagcggatcgagcgacagcctttcaaggactttatcaaaatgatacggcggtgtgaccgaaaccgtttccttccacatatgctccacccctttttgtccaagtatatcatgaagcggccgggcggcaattcgtatacttttcttcataacgccgcatgatataatggcaggcggagggttgtttatgatacatataaccgcaatcacaacacataatgagatattagataatatccccctatcacgtacagaacaaccggacatcgcatggtactggattgattttttcggcgctgagatgcatgaaaccgagctgctgcgggattattttcattttcatccgcttgcgatcgaggattgctttcagcacatgcagcggccgaaaatcgaccattatgacggctaccgtttttatgtgctccacgccttgaacccggacacactggaaatggaagaggtggacatttttcagtccgaccgtttcatcgtcagcttccatttgcacgaatcgcccggcgtctcaaaggtgagagaacgttttttcgcttctccgggattagccaaaaaagggcccgggcacatcacttatatgattatggatcagcttgtcgatgaatatttccccgtgctgtacaaaattgaagaccggctgaatgaaattgaagacagcagaacccataaatcttacggcactttaatgaatgaagtgtttgaattgcggactgatcttttgaacctgaggcggacgatcattccgatgcgcgatttaatgtaccggattttgagccttgaccatgtaaaagaaagccgtgaaacaaaggcgtatttcagcgatatttatgaccacctgttaaaactggctgagctgatcgagtcaaaccgtgatatgacgtcagatttgcgggacagctatgtgacgctgaattcaaaccggatgaacgccattatgatgacattaaccatcgtctcgaccatttttatcccgctgacgttcatcgcgggggtttacggcatgaatttcgataacatgcctgaacttcattggaaatacgggtattttatcgttttgggcgtaatggccgtccttgtggccgccatgctgttttggttcgcccgcaaaggctggtttaatattttcaagtaagaacggctgccggctgttcttttttttgagaaaacatgatagtctggaaaaaaacgtaaagaggtgtgcgccgttaccatcctttctcacaaaatcatttcttctgtcctcctgcttttcagtgtcatgtccattgccccgctgtataacggccgtacggtgtctgattacatctttgagttactcggcttttcctcttggtcggaagatggagcccatatctccgtcattccaggggtcgtgctttaccttgcggcgttaatctggtgtgccgccgcgttcaggcggacgcttcccgcggcggggctgtttctgatctttctcagtatgggggccgcttccggtatcagtcctgccaccgaatatgccgctttttccttaaaacagttcgcccccgaaaaagaggctgtcgaatatttgaagcaccgcagcgaatgcaatcatctgattgagcgaaaaagagcgggcatgagctgcacgctttatatcaatcattacggaaaaggggaacaaaccatttctgtcaccccggatttatcagaaaacataaaggacgtcacattcaaatcaaaaacgtttactgtaaagccccgttcaaaaacaatcatcaaaacccgatttaccggattttataaggggaaagccgcatcagactccgggtggtcttcagaacctgaactgaaagtggcaatcctgtacacagcagattaaccattttgcatgtataatggtggaaaacttttcattggagggactgtcaaatgaagatcgccatcgtcggactcggcaatatgggccgccccatcgccgaaaatatcatgaaagccggatacagcctgactgtatataaccggacgaaagaaaaagcggctgacctgctggataaaggggctgaatatgccgaaacgccccgccaggcagctgaacatgcagatatcgtgctgtccatgctgtcagacgatgaagccgtaacagacgtgactttcggagcttgcggcattattgccgggttatctgaaaacggcattcatatttcaatgagcacgatcagtacggcgctgtcagaacagctttccgccgcacattcgagcagagggcagtcctttatcgccgctcccgtcctcggccgccccgatgccgccgagaaggctgagcttcgcatcatcacagccggaccggcggaagcgaagaaaaaggccgaaccgctgcttaacatcctgagtcagcaagtatttgacactggtgaagaaacaaagaccgccaatgccgcgaaaatcagcgtcaatttcttgctcgtgtccatgctggaggcgttatctgaatcattcttaatgatggagaagtacgggttagaacaaaaacaatttttagaaatcgccggtgcgctctttggctctcccgtctatcaaaattacggcacgatcatggctgaggagaaatttgagccggccggcttcaaaatgtctttagggctgaaggataccaatctggcgctcgccgccgctgaacaggtttccgcaaaactccctcttgccgagctggccaagagccattttgaaagcgggatcgcacaaggcttcggggatctggattgggctgctttgattaaatgtatcaaataagcagtgaaaacctctcccgtttaggaaaaaatgaaaccaatgtgttctctaacacattggtttcttggctattataagcgtctgtttctctttgtaatcattccattcatgtccgtattaattttatttttccaaatgcaatgccgaatgttgtttttatataaggggtgctgtcaacccatattctcccttgatttttctcaattaatgctttggcaattgagagtcctaaaccgcttcccgagtgtcctgagcttctggataagtctcccctgtacatcctctcaaataccttctctgattctgtctttggtatccccggccccctatcccagatcagcagtttacattctttatcattctctataatttctatgccaagaacttttccttcttttccgtaaaggatggcattcttcaatacattatcaataattctgatgatactcaggcgatccgccataataagacactttctttccgggatatttattttaagctctaattcatttctttttatctccggcaagtattcaatcaataactctctggttatttcagaaaagtcaataatatccggctgcatcggcatttcatctgcatccagtttagccatgttaaatatttcatcaattaactgctttaaatgattcgacttctttgaaacaatgtttacatattccttcttttcttcttccgaggctgcaatatcatctttcaacgcatctaaatatcctataattgatgtaagcggtgtgcgaatatcgtgtgatatgcttgataacaggctttttctcgctgcgtgcgtttgaatcgtttccacctgtattttctctaacttctcgatcaattcgtttattgaaaaaaccatttcattaaatatcggagccccattcgcaaatattcttgtcgttaagttcccatttaatgtccgcttaaccgcatggatcatttgaatgagctcattgttgaatttgcagtaaattgtaataaggattacagacaaaccgatcagcagaccatagacaaccaatttaacagtgttaagctcttgatgctgccagtcatataaacaattgaggcaaatcagtgtaatctgcagaaacataagatatatgattttacgactcatctttctcacctgcaaatttgtatcctattccccaaactgtttgtataaattgaggattagatgggtctttttctattttttttctcagctttcttatgtgaaccatcacggtattgtcatcttctaagtaatgattgccccaaacattccgaaacaactgagccttcgtaaatacctgttccggattggaagccataaatttcagcagctccagctcttttgcggttaatgatatttcttcacctgcaacgcatacgatatatcttttcacatcaattgataaacctttatatttcagcagcggcttctcttctgttccgctgccgctccctaaaatgaaaaaccttctcatcagagccttaattctggccacaacctcgtttacgctaaaaggttttgtaatataatcatctgctcctatactcaaccctacaattttgtcagcttcatggtcctttgcagtaagcataagtattggcacattggttttttctcttagttttctgcatacttcaatcccatccatttttggcatcatgagatccaatattacgaggtgataagtattttgttcaaataatgccaaagcttcctgtccatcctttgcaacatctgctaaataaagttcccgttcaatgtatttttttaataaatctctgatcactttttcatcatcagcgataaggacacgaatttctttcacttcatgacacccgccttcatattttttgtatttatgtaagtgacagcaaatattcattattacatgatatgcaatctatcatatgatcttttagccaattttctgtactttatataaacacagatgtattcaaattgtcggcttatgaaaattgtaacgctcagcttccaaatataactttgacacaaacgtcatgatatttaaagagtaagccctaattccaacaagatcagtatttcgattatgtttttatgtcgggaatttgtcccctaaccgctaaattattacctgttgatcaatcatcaatatgagttttttgtttgtgctcgaacgaacaaaaacacctggttcatacaggtgtttctcatccgcctaaacatttttcgacctctcttttcggggtaaaatacagccctcccccttttcataaagagtaagaacttttttagtcaatgcaagccttggtacaatccaatacgataacacagctgatataattccaaaaagagctcctgcagcaacatcgaaaggatagtgtacacctacccatatgcgtgaaacagctacactaagtgcaagtatgatccagatccagcctgtttttttatatacaagccaaaaagaaaatgagatagaaaagaataggatggtgtgatcgcttggaaatgaattatccaccgcatgatctgccagtttgttaacatttgaaagaaccgcaaatggttgatgattggaatagagttgaccggcaattttcccgatcatctccgctataatgaatgccgctcccgcctgtatgaccatcatcctgtttttgtcatttcgggtaaaccagaaaacaagcataacgagtgctaaaacaaacactgcatattcagcaagtatgatcattgccggatttagaaatggatattcttttcccagatcgtttacagcacgaaaagcggcaatattctgctctgataaagacatttatatcatcctcctatttaaaaatctcatttatacatgtaagtgatttgtgcgaaccgcaaacaatctgcttttcacttgaaagcatttataaaaactaatgtatatccaccttgttaaaatagattattaaggaaacaaatcctactattgagactaaagcaattcctgcataggagtactccggaggataagtagggagaagcgtattcattgaaatgtctccggccgctgcccatgggaacaatcctctgtgttctgagttagctgtcataatatttatcaaagtaattaggattgtaaaaataatggtgggtacgtaattctttagaacaactgtgatcagaacaataggtgttgataaaacaaatagtaaaactcccccaattgcaaagtgcaaaaatgatttgagtacgagtgattggctgagacccgggaattgcaagatcacacccagtaataaagtaagcccccacgcaactaaagttaaaaagaatatccagataaatagcagcaatagtttactaagtatcagattgattctggaaacgggtatggttaaaaggtttttcagtgtatcatccatgtattccctgttaaaaatataagcggcaacaactccatacaacggaacccccactaccaagactgtatataagttagcgttgctgaaaagttcatgaaattttatgacaggagcgggattctcagtctttatctgtacataggatgcaacgacaaccataaatggaacgaccgaagctcctatcgtacttattagaagcatcgcagaccttctgagttttagtaactctgcatataacagattaaccaatggttccgcccccaaccaattttgtgaaataatcctccagacggtcttcactcatcaaaattttaaacacctcaatatcgttctgaacaagtaatttattaatcgctccctgttgtccaatatgcgagaaaatgcggagaattccgtcaccatgtacttcgtagtcaaagatctgaaaatgtttctctaaaagcatcgcagctttattatcattcgaaacttgaaactcaagaaactttcgatttctcttccggagagtatcaaattcggtttcctctaacagttttccctcgtgaataatgcccaaatgatcaactaattgttcaatctcagacaggatatggctcgatatcagcagagtaatttttctttcttcagctaatgttttaatgagccttctcatctctttaatcccaatcggatctaaaccattcgtcggttcatctaatattagtaattccggatagtgaagaagagatcgggcgatgccaagtctttgcttcattcctaaagagtatttgcctacaagctttttggtttcattctctaatcccacaatttctaatgcttcttcaattgcattttttttgtgaattccaacgatcctggcatttatttcaaggttttctttagcagtgaggtttccatagaatccaggtacttctacaattgaaccaattctttttagaatgtctttcttattcgtatgtaaatcctcaccgaatatctcaatctttccatgagtaggctttatcagccccagcagcattcttatagtcgttgttttacctgccccgtttctcccaagaaacccgtaaatatctccttcattaactgttatgttgaggttatcaactgacttttgttttccataaacttttgttaaatttgtcgttttaattatttcctgcattgatccagacctactttcctaatgcttatgtacaatagtataggaatgcgtttttaactggagattaactatttcttaactatctcttaattagaggggcaaaaaaaaactgccccctttaactgggagcaggtttcatctcagtgatgtttatggcgtaagggttttgacgcctgcatcaagataagactatatgatgaggcgcttcccgttacaaagacggcagcttcatttctttctcaaacatcaggtcatcaatgcttttaaacgtgtagccttcttttttcaaatcggtaatggcatcgtccagagcttctgaattgtcctttgaaacggtgtgaagaaggtagatcgcgccgggatgcgcctgctttatcatgtgatcataggcatattgtttccctttttgctcgttaaccttccagtcgacaaatgcgacggaccagaaaacggtttggtagccgaggcgcttcgtttctttgaggacatattcgctgaatacgccgcgcggcggacggagatacaggttgtcccgctttccggtaatgttgtacacagcttccgtgacggaatcgagttcgtcttgaatctgatcgcccgtttttgtcgtcagatcaggatgatgaaaagaatgattgccgatgatatggccttcctttgacatccgtttaatcaaatcaggctgctcttttacaaaatgacccgttacaaaaaaagtgcccgtgacatgatgtttttttaacacatcaagcactttcggggtgtacccattttcatatccgttatcaaacgttaaatagatggtcttttctttcgtattgcccaaataaaaggcatcatattttttgaccagattgtccagctgtctgccggcatccggcggctgatgattgacactgcgtttaaagccccagtttatccgttcattcggaacggcctctgcgctgttgatgcctcccgcaagtaaaacggccatgcagcaaattgaacaaaaccatttcatgcccagcactccttctgcatttttccttattttgcagtaggccctgcccttttatacagccgcattatggaaaaagaaaaatcccggcattccgccggggtttattcccaatcctttttaaagcgttcgtattttgcttccagatcatcaagcatgccgatgagccggtctatatcttcaacatccgttgattcagggtctaatgaatcaatgacattcataaacatatcgagtctgttcttcaggtaatcgagctgctgatctttgctgtttactgcattccccatacttccactccattcattttttataatggtagcgtattttttgccgtttttcaatggttccgctacttgcgatcttggcagatcaggtctaaaattaacagttggcagacgttagtatgccccatttataaaggagttagatagtcatgacacaaaacacagcactgcgtccgatcacaccggagtacgatccttgggaagcgtacatggatgtcgaccagtatggagatatgaaactgacgaacgttgaattcacaacgacgactttgtgcaatatgagatgcgagcactgcgccgtcgggtacacgctccagccgaaagacccgaatgcgctgccgatcgaccttttattaaagcggcttgatgaaattcctctgttacgctctatcagcattacgggcggcgaaccgatgctttcgctgaaatcggtaaaggaatacgtcgtcccgcttttgaaatatgcgcatgaacgcggggtgcgcacccagatcaattcaaatctgacgcttgatatcgggcgctacgagcggattattccttatttggacgttcttcacatttctcacaactggggaacggtcgaggactttgccgacatcggatttgcgatgatggagaagaaaccgacatttgaacagcgggcgcgctattttgacaaaatgattgaaaacagccgcacgcttgtcgaagcaggcgtaatggtttcagcggaaacgatgctgaacaaacggacgctgccgcatattgaacatattcaccggcagattacggaagaaatgaaatgccagcggcacgaagtccatccgatgtatccgagtgatttcgccagcgcgcttgaatcactcagcctgacggacatgagacaggccattcatcatctgctcgacattcgcgatgaagagacatggatgctgttcggtacgctcccgttttacgcatgcagccctgatgaagaagaccagaagctcctccgccgcctgcgggaagcaaaaaacgttacggtgcgaaacgaccctgacggccgctcccgcctgaatgtcaacatttttgacggaaatatcattgtcacagatttcggcgatacaccgccgctcggcaatattaaaacagacagccttcctgaagcatatgacaagtggagacagacgaagctgagcaaagaactgaactgccgctgcacaaacgtccggtgcctcggcccgaacgtccttgtcaaaaacagttattatcaggacacggatttttcattacgaaaagccagaggttaacagaagatggaaacgacaattacggatattttgaaaagcaaagtggttgagatcatcatcgtcgctctcgtgctttacgccggtgtttttctgatcaaccgctttgtccaggtgttatttaaacgcacggatttcttagaggaacggaaagggaaaacgattgaaagcctcgtccggtccatcacccagtatacggcgacgatcggttttatcttttacgtcatttctttattcgttcatgatttcggccgaattttagccggggcgggtgttgccggtatcgtcatcggtttcggcgcacagtcgttaatcaaggacatattggccggtgtctttttgatatacgaacgccagcttcataaaggcgattacgtgacgattaacaatctgttcaacggcacagtggaagaaatcggactccgttccctccagatccgtgagtggaccggcaagctgcttaccatttcaaacggtgaggtcagacagcttcaaaactataacattgattttatgcggattaccgagtccgtcgtgatcagttacaaggaagatcccgagcgggtctatgccgtgttagaaaaagcctgcgacatgctcaatgatgagcttcgcgattcactgaagcgggatgaatttctcaatgcgacggagccgtttcaagtgcatggaatcatgagcctgaacaaattgacaagaggcatagaatttaccgtcaaaggcatggttcaagacacagaatacttctcggcgagccttgcggtgagacgcgttcttgcccgggagctgtacaacaacaatgtgcaattgcttgaggaaatgtatcacacacaaaaaagctgattcccgaaccggaatcagctttttttatttatctcggctgcgctgtcatttgaaaaccgaatgtgacgtgatcctgcaccggaatccaagccccgattccttgcgaagtcacatttttgacgacaagtttccgcttgctgcctttcagcaccaaatacacttcaccgtatgttacttttcctttttcattaacggccggagcgtaggcgtgcaggtagccgagccgctgcggagaaattttgtaggtttgatcgcgttttgtgcctgcgccgataaccgtttcaaacgcgagcggcagttttgttttcttcatcgctttttgcatcatcatgctttttacgtcttctgcgttcggcaccttcgctgtgagcccgcctttgattttgtattgctgttcttgggcgtatgagataaccgcggtttgctgcccgccccggttatccgctctgttcgtattgatttttttatattcccagttggcgaccgtttcgttcgattgatagccgagcgcccatttcccgagaaatattgtcgcccggtatccgatggcaagcggtgaaccggaaaccgaggattcattcagcatctttatcagatgcggattttcgatgttgatctcggatgtatctaacaattcctttgccagtttgctcggctgaagcatcggctgatcctgtgaagcattcggatacgtattttcctttgaaatgcttacgacagagttgggaactttaaacggtttttttgcatcggcagacggcgttgcgaaaaaactaaaggataacagcagaatcagtgtggcatgaaacagctttctcatcatatcactctttctatagcattttcctttagtcttttcctccgcaatcgttgttatccgcattttttacaggttaaagcaggaaaaaaccgatcgccatgatgacataagcggcaaggagcgtagccccctcaaaccagttcgaatcaccgtcatttgaaatcatcgtcatcaaaaggacggatgagatcatcgcgacaagctcgggcaatgtaaatacaagcggcatattgaccggaaaaaagatggaacagatcacaagaaccggagccacaaacatggcgatctgcaaagtcgagcctaccgcgatttcaacggcgacatccatcttgtctttgtacgccataataatcgccgacgcatgctctgcggcatttccgacgattgcgacgataatcactccgataaacagctcgctccagccgaactgttcagccaccgcatgaaacgtatggacaaggttttcagatatgtaggcgacgataatggttgaaataaataagacggctgtcgctcttttccccgaccactcaggctgctcctcttcttcctttgcctccggctgattcggctgataaacaccgcggtgggtgacgagcttgaaataaagagctgccacgtacaaaaggatcatgatgatgctgatgccgacactcaaatcaagcttgtttttttcccccatatccatggaaaacacttcgggaatgacaaaagctacgataatggcaaaaatcagcaggccggaattatgccgggcatcatgaatattgaattcctgccgcttgtatttcaaaccgccgataaaaaacgacaatcccgcgacgagcagaagattgccgagcaccgaaccggtcagtgaagcaagcacgatgcccgtcagcccttcttttaaggcaaaaagcgatataataagctctaccgcattgccgaacgtggcattcagcagaccgccgatccgcggtcccgcgataatggcaagagattcagtcgctctccccatataacttgcaagcgcaataatcgtcaagcaataaataataaacaaaaccgctgacggccagtgcatcaggccgccgatgactgaaagcggcactcccgccgcagccgtaaagaaaaaaatccgattcatatctgcctggctccttttttcgaatgagtctttttatatccttctcaaaaactccctcaattacacttccgcggcagcccgaattggcattttcaggttgccggacgcgacaaatccgtgtacgatcaagaaagatactgaagaaggagaaatacgcgatgtcacgactgtacttctttattttggttctgcttgtttccatctccggattttcccaaggcatgcttctgccggtgatctccgtcatttttgaaacgaacggggaatcagccgctataaacggacttcacgcaaccggcctttatatcggtgtgctcctggcgtcgccgtttatggaggccccgctgcgcaagctcggattcaaacctctgatggtcatgggcggatttcttgttatcatcagcttattcagttttatttggcttcaatccatatggttatggttttttcttcggctgcttatcggaatcggggatcatatgctgcatttttcaacccaaacgtgggtgacgtcaaagtcaacgccccgaaacagaggaagaaacatttcgctgtacggactgtccttcgggcttggattcgctgtcggcccgttcatggtccctcttgtgaaaacaagtccgtcccttccgtttatcgtatccggctgtatcagtcttgccgcctggctgtttgtatttgtcttacgtaatgagtacccggcgcaaggtccggatgaaacatccggggacaatagcgcaaaacggttttaccgcgcccttcttttcggctgggtcgcttttctcccggctttcgggtacggttttttagaaacggcgctgaacggaagctttcccgtgtacgccctgcgtttaggcatatccgtcgatgccgtcgcgctgatattgcccgcttttgccatcggaagtattgtattccagttccctctcggtttattaagcgatcgattcgggagaaaacgtgtcctgctcgtcatcttattaacgggtgccctttgctttttgacggccggactgtttccgtcgccttctgtcatcggctgctgctttttcacggcgggaatggcggtcggcagtatgttttccctcggcatcagctatatgagcgacctgctgccgtcccatctcctgccggcgggcaatctgctctgcggcatttccttcagcctcggcagcatgatcggcccggtcgcgggcggctggtatatgcagcggtttgaaagcgccaatttgttttactttattacggtgattctggtctgtatttggcttgcgctcgtcttcgggaaaacaaagcacagtcccgcatccgaatcccattcttttccggcctcataaaaaagccgcctgatctgagtcaggcggcttctttctagtggtatccgttctgcccgttagcgcttccgcttgttttattcttcgggccgttttttgagttttgtttattatggcttccgccttttttcgtatgcttggtcatagccgattccctccgtttttcagcttgaacgtcatccgttcctctatagcttgctcccgcggtacggattttcatcaggaagctttttacgtttatgtaaaagcgcgttgatttctcctcctaaaatcagcagtgttcccgtaagataaaaccagatcataaggacgataattcccccgatgctcccgtatgtggcgctgtagttggcaaaggtgccgacgtaaaatgagaacagcatactgacgataatccagccggctgccgcaaatacggctcccggcaggacaaaacggagggaaagccttttattcggcgcgaaaatgtaaagcgcggtaaacacgattaacaggataagcggactgataccccagcggacaaccgaccacacctgcaaaaacaggccggaggcgccgatgaaatctgcggccagcattccgatttctctgccgaacaccggcagaagcaatgcgattaaaatcgtaaccaccatcgcgatggttaaaaaaattgaggtcaggcgaatgatgataaatgagcggttttcctcgacttcgtaggcatggttaaatgctctgacaatcgcgttcatgccattcgaagccgaccagatgacggcgataatcccgaatgacaaaagcccgccgctgcgcttgttcagcgtttgctccgttatggatttcaccatggacatggcgctgtcgggcgcgtattgatcgaccgccccgagcacgtcttctgccgatatgggaagataggcggtgagcgtcagcatgaaaatcattaacggaaacaatgacagcaggaaaaaatacgccagctccgccgatttactttgtccttcatgcagtgaaaaccttgcaaacagctcctttataaaactcatgacatcccacctcaatgatcgtttttcgaaaaatgctccttcgtttcttttaacaggtcaatgacctgcggcgtcgtctgcttcagcttggtgatctgcccgtttaaaaaactcagatcttccgatacgttattggcgatgattttcacttgatccagttttgcagaagcctgctgtttcagggcttcaggatgttttcggtaaaatgccgcacggcgcctgcacgcgtccatgttccggaaacatccctctctcgtcggcttatgtaataaggacaatgctccgccggcggcagcgccgatcagaatcgcttttgtcatgatgcgtgtctgcttcatcggtcaatcccccttataaatgatggtctttctttattgtctccagcaaatgacggcacccggattcgaccaaagcgtacacctcgctgaaattcccggtataatacggatcgggcacgtccgcaaggtccgactccggtacataatcaagcagccttgcaatacgcggcgccgcttttttataaccggccatgctgcgcagatgtccgatattttctgcatccatcgcgatgacgtaatcaaaatcggtcagatcagactcacggacctgcctcgccgtgatgccgcttgagctgatccctttcttctttaggatctcctttgtcccttcatgcggcggatttcccgcatgccaggcgccgattcccgctgaatcaatgttaatctgcccgttcagcccgtttttcttcaccatatcagaaaataccgcctctgccataggcgaccggcaaatatttcccagacagacaaacagcacatgtatcatatcgataacctccctattctttccccgcattttgaggatcaaaaaccttatcatcatcttagcaacttttctgcggctgtggaaataagcttttattctaaatgaattctgttagaataaagggtacgaaaacggtcatgaaaggatgcatgaatttgccgagccaacaaacagaaacgttaaacaaaatgattgaagacatttcgcaaaagctcaacatgctcaatgtcggtgtcatcagagcggaagatttcagtgatgaaaaaatagaagatcttacataccttcatcaaatggtcatgaaaaaagcatcattcagcccgagtgaaatgcaggccattgctgaggagctcgcctctctcagaaaataaacccatgtccgacctgccgaaaaacggcgggtcttttttgatttaaaaaagtaaaaaataaaagttcatcggtttgacacatataaaaagaaggagtatagtaactgcgaacttggtagaacgatatactaaatgagcgggccgcttatctttttttattttagtagaacgatatactcgtcgtgatatcagcgttattcaagtttgtctcagcagccgttttatcaaacagttttcaaagaaaggcagtggttcaataaaggggaatggatctgcgcttatcaatttaaaaaaataatttaattctttattaaccgcattaggggatgtcatcatgaaaaacatatacaccaaaatggcagcgggtctttatattaactatttcctgctgggcatgatcaatattattatcgcatccaatatggaggcattatcaaaacagcttcatacatccgcagccggggtcagctatttggtctccgccatcgggatcgggaagctgatttcgcttctgtttgccgggaagctttcggatacattcgggagacggccgtttatcgtgtcgggcgcctttctgtatctgattttcctaatcggaattccgctttcgacaaactatatggccgcgtttatcttcgccattttcgccgggatcgccaattcctttttggattccgggacatatccggcgcttattgaaggatttccgaaaaacgcaagctctgcaaccgtgttaatcaaagcgtttgtatccatcggcgcgacggtgcttccgttttttatcgcgtttattgcggacaggcatttgttttacggctggacgtttttcgtaccgggcattattttcttcctgaacggctttttcctgttaaaagttccgtttccgaatcataagcaaaaagaagacggcggccggacggaagcctctgcgtctgatgacgcgttcacatcacagccgtcgatatggcgcgaaggccttgcgatcattctgttaggcttttcatctacggcgctgtttatgctcgttcaagtatggcttcctaagttcgggcaaaccgttttgggcatgcctgaggtgcaggccgtcaaattgttgagctattacagcatcggggcgcttgtgtccgtattattgctggccgtgctgttaaacagagtgattcagccgattacggtaatggtgctgtaccctgtgatcgcggcaatcgcgctgcttgctctgatttttattcagcagccggccgtatcagtcatcagctcctttgtcatcggactttcaactgcgggcattctgcaattggcgatgacggttatggctgttttattccctaaaaataaaggtacgatcacatcttttgttaatatagcatcaagcttatcttttattgtcattccgcttgtaacgggagcgatatccaaagcggccggcctgacgcctgtttttctgcttgatatcggaattgcggccgtcagcgcccttctcgcattgtttatcggaatccgctttaagcaagtgatgaaagcctgactttttttaagggagaggatttatcatgcaatctatcacgatcagaaacacggtcatcggcgaagggcttccgaagatcattgtgccgctgatggcggccggagagaaagaactgctcgaagaaattgaagccgtcaacaggcttcgcccggatatcattgagtggcgggcggatgtatacgagcatgttgacagcctggacgccgtaataggcatgcttgaaaagctgcggaaggccgcaggcgcaacaccgctgcttttcacattcagaactcataaagaaggcggaaataaagttattgatgaccgcttttacattgaattgcttaaaaccgccatcgaaacaaaacacattgaccttgtggacgttgagttgtttacgggagaagcggaagtcaaatcaattgtgaaaaccgctgaagacaacggcgtatatgtcgtcatgtccaatcatgattttcatcagacaccgaaaaaagaagaaatcatttcccggctgcggaacatgcaggcgtacggcgcgcacattccgaaaatcgcggtgatgccgcaaagcactgaagatgttttcgtcttattggatgccactcacacgatgaaaacacaatacgcagaccggccgatcatcacaatgtcaatggcggggacaggcctgatcagccgcctggccggcgaagtcttcggctcagcgtgcacgttcggagcgggcaaagaagcatcagcgcccggacagattcccgttgaggaattgcgcagcgtactcagcattttaaataaacatatgtaatcagcgtttttctgccctcaaagcgggatgaaaaacaaatgaatggactaacggaggaatacatcatgaagaaagaattaggacggattaacggaaaaactcagcttatcggattattcgcgacaccgatcggacactctttatctccggcgatgcacaacctggcgtttaaaaaattaggattgaactacgcttacctcgcgtttgaagtcggcaatgaacagctggaagatgtggtaacgggaatgcgcgccttaaacgtcagaggattcaatgtctcgatgccgaacaagatgaacattctcccttacctcgatgaactcgcggattcagcgaaattcaccggcgcggtgaatacagtcgttaatgaaaatggcagactgatcggacactccactgacggtatgggatacgtccgcaacttaaaagaacacggcatcaatatcacaggcaaaaaaatgacgctggtcggttccggcggggccgccactccgatagcgattcaatccgcattggaaggcctcggagaaatctctattttcgcccgcaatgacgcgtttttcgaaaaagcggaagaaaacgtccgcatcatcaatgaagaaatgaagggatcttcttgcaaagcgaaagtcttcccgctcgaagatcaagatgcgctgcgtgctgaaatcgcttcaagcgatattttcacaaacggaacgggtgtcggcatgaaaccgcttgaaggcttgagcgtcattgaagatacatccatgctccgtcctgatttgattgtgacagacgtcgtttacaaccccgtgacgtcgaaattgcttgaacaagctcaagcggccggctgcaacaccattaacggcctcggcatgatgctttggcagggcgccatggcgtttgaatattggacaggccgtgaaatgccggttcagtatattaaagagcaaatgtttgaataacctattgtaatagaagcgccgaaggacagtccgtcttccggcgctttgtcattttctcccctctctctttcttctcagccgccaaaacgcttataatggatgtaacgaataaaaaccaagtgaggaatgcgacgtatgaaacagcaaaaaaaacgccgggtgacattgcagcaggtcgctgagcatgccggcgtctcaacatccaccgcttcattaatcgtccgaaataatccgcgaatttccgaagcgacccgtgagaaagtgctgcaatccatgcgggagctggggtacgtatatgatcgggttgccgcgaatttacgatcacagacgtctacaactgtaggtttgattattactgacatttccaatacgtttttctcagagtttctgatcggcgttcagaatacgcttgaggaagtcggattaacggtgctgttaggcacgacatttgattccgtcgcgaagcaggagcagctgatctcgaccatgctcgagcacagggtcggcggattgattttgtgtccggtttcaggtacggctgaggaaaccctttcccgccttgagcagcttgacattccggtcgtgctcgccgtcagggagattgccgatgccgactgtgattttgtcggagccgattatgaggaaggcacctataaggcagtgcgtcatttcattgagaaaggccatcaggagattgcgtttctgggcggcgtgaagcactcgtcaacatggacgaaacgtatgaaagggtttaaaaaagcgctccgtgaagcggatctggaagtaaaaaatgactatgtcattgacagcgcgccgacccgcgaagcaggctgtgaagccgtgacggagctcctccgccggtctgagcgcccgaccgcgattttctgcttcagtgatttggtcgcgttcggcgtcatgcaagggatcagaaaagccgggctcattccgggcgaagatattgacattgtcggctttgataacgtgccggaagctgaaatttcttatcccccgcttacaaccgtttcttcctttccgcggcagtcgggaaaagaagcggctcaattgctgcatcataaaatcaccaattcccagcacaaaaaacaacgcattattctggcgcctgagctggtcatccgggaatcttcacaaaaaaagcggaacgcctgatacggcgctccgcttttatattacgcaagcagttttaatgattcgcggttgaatgccggaatgtcatccggtgtgcggcttgtgaccagctggttctgacagacgacaacttcttcatccaccacattcgcgcccgcgttttccatgtcgattcggattgaagtaaaccctgtcgctttgcgcccgtccaatgctttcgcgttgatgagaagctgaggtccgtggcagatggcgaacaccggttttttatcatccataaacgctttggcaaattggacgaaacggtcatccgcacgcagcatgtcaggcgagaatccgcccgggatcagcaatgcgtcaaagtctttcggattcacatcatcgatggacgcgtccactttcacttcagcttccccttgtttgcctttgactgtttttcctttttcctgttcaattacggttaattcatgacctgcatctttaaaagctttcgcaggttcagtatactcgacatcctcaaaataatccgttaatacaactgcaatttttttacccatagttactacctcctgcttgatgaagtctacataaatctatgtaccccagccacactaacatcaaacataggtaacgcgtttgccgctcatccgttttacataggtcattatcctcatttttcatctttttacaagaatcatcatgaaatctatatgaactttcacaaaatattcttacaatggtactgcatgacaaaatttgttgaaaggtggagaacaggtgagaatacagaaaagacgatgcagcgtcaatatgacactccgtattctgctgcccctagttatgatacttagtctaatcctcccaacattacccattaaagcagaagaaaacaaatcctccagtgtgaatctcagcattttagccacaactgacgttcacgctaacatgatggactacgattactacagcgacaaaccgacaacggaattcgggctggccagaacggctcagcttattgagaagcacaggcgcgaaaacccgaatacgctgcttgtcgataacggagacctgattcaggggaatcccctcggagaatacgccgtaaaatatgagaaaaatgatatcatttcaggcgcaaagacccatccgatcattgaagtgatgaacagtctgcattatgacgcaggaacactcggcaatcatgaatttaattacgggcttgaatttctggacgggacaatcaaaggcgctgattatccgatcgttaacgccaatgtgaaaacattaagcggcgaaaaccgttatacgccttatgtcataaaagacaaaaccgtcacggatgaaaacggcggcaagcatcagataaaagtcggctacatcggctttgttcctccccaaatcatgacgtgggataagaaaaatctcgaaggccgcgttcaggtcgaagacattgtggaatccgcaaagaaaaccgttccgaaaatgaaagctgaaggagccgatatcgtcatcgccctcgcccacagcggcatcgaaaaaaaagcgcagtcttccggagcggaaaatgccgtttttgacctggcaacgaaagtcagcggaattgacgcgatcgtatccggccatcagcacgggcttttccctgatgccgaatacaaaggcgctgatcaattcgacgtcgataaaggcacgattaacggcatccccgttgtcatgtcaggcagctggggcaaatatgcgggcgtcatcgacctccggcttgaaaaaacagacagcgcgtggcatgtggaagatgcaaaaggcagcatcgagccgattgccggcaatgtgacgtcggaaaacgaaaccgtcgtcaataccgtcaaaaaagcgcacgaaggcactttgaaatacatcagagaacccgtcggccagacaaaagccgatatcaacagtttcttcgcccaagtcaaagatgatccgtccattcaaatcgtaacggatgcgcaaaaatggtacgccgaaaataagatgaaggatacggaatacaaagatctgcctatcctctcggcgggcgccccgtttaaagccggcgggcggaacggctcaaattactatacaaacatttccgctggcggcctcgccatcaaaaacatcggcgatttgtacctgtatgacaacacggttcagatcgtcaagctgaacggaagcgaagtgaaagactggctcgaaatgtccgcggggcaatttaatcagatcgatcaggcaaaaggcggcagccaagcgcttttaaatgatgcctaccgctcatacaattttgatgtcattgacggtgtcacctatcaggtcgatgtcacaaaaccggcgaaatacaacgaaaacggaacagtcattcatcccgatgcaagccggatcgtcaacctttcttatcaaggaaagcccgtcagcgccaagcaggaatttctgatcgtcacaaataattaccgcgcttcaggcggcggaggattccctcacttaagcaatgataaaatcgtatattcatcagccgatgagaacaggcaggtcttaatggattacatcatccagcagaaaacgattaatccgcaggctgatcataactggtccatccttccggtcaaagggacaaacctgacatttgaatcttccttggccgcaaagccgtttgccgaccgcgcagatgacgtcgcctatatcggtgaatcacaaaacgcgggctacggacagtacaagctccaattcaaagatgatgaaccgggcacagatccgccgaaagatgatgcatggaaactcaccgttatgcatacaaacgacacgcacgcccaccttgataacgcggcgaggcggatgacgaaaatcaaggaaatcagaagcgaaaccgaccgcagcattttactggatgcgggagacgttttttcaggcgatctctatttcacaaagtggcaggggctggctgatttaaagttgatgaacagcatgggctacgacgccatgaccttcggaaatcatgagtttgataaaggaccgggtgctctcgccagcttcctgagcggtaacggaagcgcggctgacccgtccggaaaatacaatttccaagcgcctgactttccgctcgtcagctcaaatgtcgatgtgtccaaagagtcaaaactcagaccattcatgaaaaaagcagacacatttacggcagggaaaaagaaaaaagcaggcatctatccatacattctgcttgatgtaaacggagaaaaagtcgccgtattcggcttaacgacagaagatacgtccgtcacatcaagcccgggaaaaagcattgtctttcatgatgccttccaatccgcacaagatacggtaaaagaaatacagaacaaggaacatgtcaataaaattatcgccctgacccatatcgggcatcagcgtgatctcgatctcgccaaaaaagtaaaaggcatcgacttaatcgtcggcggacatacgcatacgcttgtagataaaatggaaattgttaaaaacgaagagccgaccatcgtcgcccaggcaaaagaatacggcgaatatttaggccgtgtcgatgtcgcatttgacaaaaacggcgtcgttctgccggaacaatcctctcttcaagcgctgccggtgaacgagcagacgaaagaagacccgggtctgaaaaaagagcttgatccgtttaaaaaagagctcgtctcagtcaaaaatgaaaaagtcggctcaacgaaggtcgcacttgacggccagcgtgagcatgtccgctccaaagaaaccaatctcggaaacttcatcgcggacggcatgctgcaaaaagcgaaggaagcggccggcgcccaaatcgcgatcacaaacgggggcggcatccgcgcgggcattgataaaggagacatcacactcggcgatgtgctgaatgtaatgccgttcggcaacacgctttacgtcgcggatttaaccggcaaacagatcaaacaagccttggaacaagggttaagcggaattgaggctcaaggcggcgccttccctcaagttgccggtttaacatacacgtttacactgaataaaaagccgggacaccgcgttcttcaagctgcggccgtacaggatgacggcagcgtaaagccgatttctgataagaagacatacagagtcgccaccagtaactttgtcggtgaaggcggagacggatattccgtctttaacaaagcgtcccataaagaagaccttggctttgtcgactatgaggtcttcaccgagcagcttgaaaaagcgggaaaagcggtggaaccgaaagttgacggccgcgcgcaggaagtgtacctgccgacgaaacaaaaaaacggttcgtggacgcttgaagatgacagcgcatttgccgtctatgccaaaaacgccaacacgccgatcgtgtattacgataagaatgacggcgccaaaaagccgattgatctcagcgtgacccaaaaacaaatcggcctgttaaaggacagaacatcggattcttcccttacgatcctgcatgacaagttcagcatgaaaatgccgatggcaaacgctgcttcagctgatacacgattcggcgtgacgccgaaaggaaaagtaagcggggcgctttcaaatgtatacgactttacaatgaagcagaaaaacaaagacatcaaaacattcaaagcgccggtaaagctcaccctgcgcattgagaatatgaaaaaggcgaaacagcccggcatttaccatgtagaccggaaaaagaacgtctatacaaaaacagacaacggttcggtttcacacgatctcgtcacgggctatacaaatcatttcagtgaatacaccatattaaacgcaaacacgaagagcgcgccgccgacaagcggagaccacggctccggaaagcagccaagcggacaaaaaccgtcatccggccctgcacaggacggggtatcgccgggcggcctgcttcctgatacggccacaacgatgtattccatccttcttgccgggttactcatcagcgcgctcggaacggcactgtatctgcatcaaagaagaaaagcaaaaaaagtgaacgaagcataaaagaccgctttttatcgggcggttcatcccaaaagctctcctgttctgaaatcaggggagctttttctctcggtccccttctgagtcgacagccgtacggccgagtgataaaatatgaccgttattcgcgaaagactgcatccgcatcgtttaacacttcacggcagggcctctctttcacacggcgccgcctgtttggaggactttttttgaagataacaggaaacaaacgaaaccgcatgtcttacaagaaaaagctgttttacgtgataacagcgctctgttttatcagctcgctcattttcgtcactcacaacgcttctttttatgagcggccgattgccaaagtgacgaaaacaacattggaacatcagtctgacgtacaggacatgcataaaaacaaagataagattttcaatcagacgatcactgccagacttgaaaacggcagtcagaaaggacagctcattcatttgtccaatcagtattcatcatccggagcgaatgatcagaaatattcgattggcgatgaagtattcgtttctattgataaagggaaaccatcaaacaaggatatatcgggaagcattatagataaaaaacgggataaacagcttttgctgatcgcttgggttttcatcttcaccttgcttatcgtcggcaaaaaacaaggcttcttttcgatcgtcagcctgatgtttaacgccgttttactgtcgtttgcattagatttgtacaggaagcatcctaatatagggttaattttcatctgcggtgtctgtattctcatctttactgtcatctcattgctgcttgtcagcggttttcacgcgaaaacatatgccgccattgccgcgacgctcgcaggcactttcgtttccctgctgattacgtatctggtgatgctggcaaccggagagaaaggtctcagatatgaggaaatgcagtatttaacccgcccttatcacacggtgttcatggccggggtatttatcggatcactgggagcggtcatggatgtagccattaccatgacgtcatctgtcttcggattatatgaagaaaacaagggtatctcattacaagctctcagacgttccgggatggagatcggaaaagacatcatgggggcgatgaccaatattctgttttttgcttatataagcggctctattccgatgatgcttttgtatttgaaaaatgattccccgataggattcactctttctatgaacatttccttggaaatagccagagcattggccggagggatcggaatcgtattagccatacccgccagtctgtatgcttctatcttttttattaaacgaaagaaggcaagctcatgaatgtcatcgtaattctcgcggcgattttatttctattaatggtcatcatcggcggaaaaaaaggagcgaggtcttttattgcgttattcttaaatttcggagttctctttctcaccatcattttcatgacagacccgcatatcaatccgattgttttaacattgctctcttccgccgtgatctgcagcattactcttttttatattaatggaggaaacgtcaaaaccgtaaccgcctttatttctgcaatgctgacgattgtactgctgctgttttttattatgtccgtaacaaaacatacttcgattcagggattcggtgaagaagaattgggtgatatcggcatattcacactgtttgtcggggtggattttgtgaaggttaccgcagccatgatcatcatgggcacgattggggcgattaccgatgtcgcgatttccattacttcacccatgcgggaaatttacagtcataatccgtccatgagcagaaaagatctgtacacattcggattaagcatcgggagagatattttaggaacgaatacgaatacgttattctttgcttttttcggcagctatttggctttaattatctggtttaaagacttatcatactcagctgaaaaaatagtgaactcaaaagtattcagtgcggaagccgtcaccattctttgtgccggaatcgggatcggcatcatcattcccgttacgtcctggatcaccgcctgttttttagcaaaaccaaataaacgttaaaagctgccgggacacgcccggcagctttttttattttatacccactttacaacgtcttttgaggcagatcttgttttcgggcgcgggtctctgacacggtagccgaatgcggccataacagagatgtcgaaacttccgttttccagaagcccttcttcttcaagaatccggtgaatttctttgtagttgaagccttctacagggcaggagtcgattccgatctgcgcagctgctgtcatcatattgccgagggcgatgtaagtctgtttggatgcccagtcaaacagcgcgcgatctgattcaagcagattgaaatcatttttctggaagtcttccgttttgctgatatagccttcatacatatcttccggcatttttttgacttcccgcaggtggtttttgacatagtcggcgtcaaaacggatatcctttgccgtccgggcaagcagaagtacgaaatggcttgcggtcggcagctgcttttgcgcgccccatgtgaactcgcggagtttttcacgaagctccggattttgaacgacgacaaatttccaaggctccaaaccgagcgagcttggcgataatcttcccgtttctaaaatgaattcaaaatcgctttctgaaatttttttctcaggatcaaattcctttgtggcgtgtctgaattgatacgcttcgatgatctgctgttttttatctgacattggtgatctctccttttcaatcgttatgtactattgtagccattatttttgaaagtaccagtacgcacatttttgttggatagtattcattttgatactgacaaaaaaacgggctgccgcggcagtccgtttttatttttctcttctcgcaaagtcgacgaaacggaatttatcgagcctgtgccggctttccgtgtactgaaagaggctggtatcctccaaaaagacacggtttttcacgaccgccatatggctgaatccgccgagatccaaatactttcggtcctcttcccccgccggctccacgacaatttccttttgcgcgtagctgatggacaagccgagctctccttcgagatactcatagatcgaatcttcacaaatcgccttcgtcaatagaggcacgtgttttttcacaaagtaatccttgtccaaaataatatgttctccgtcaatccgtcttgatctgacgacttcccacaccttttcatccgcttctgtaccaagctcttttgcggcttctgagggaggcaggatcagcccgagacggtgaaccgtcgttctcgtctcttttccgagcgtttccgaaagctctttgaagctgatcaggcctgagacgggaaaacgcattttttctctgtctaatatgacggagcctttgcctttgattttctggatgtagccgttttgcgccagcatattgagggctttgcggacggtttctcgtgatgtgccgtattgatcgcacaaatcattttcagacggaagaacgtcttcagccttccgctggccgctttcgatctgccgcaccatatctttatagattatgatgtatttattcactttcatttgaccacccagattagtgtatcacgcttttgtcagatgataaacgatcgattcatacggacggagcgtcaatcgttccggccgcccttccctcggttcatcattcgtcagcagcaccgtaaaccgccagccgtccgtgtctttaagcggaaccgtaaagtccgcttctttcccgtagaaattgttgatgcacagcagtttttcatccttgccgtgtctgacgtacgccagaactgccggatcgtcttcagcgagcagctcaaacgttccttcagtcacgatgtcatattcctttctgagcttgatgagcttctgataatggtagaaaattgaatccgggtcccgcaaagccgcttccgcgttaatgtcccgataatcatccgccgccggaatccaaggcgtgcccgtcgtgaaaccgccgtgcggcccgctgttccactgaatgggggttcttgcattgtctcttgatttctcttttaaaatggcgataatgtctttttcgggcacgccttcttccttcatctttttgtacatgttcaatgattcgacatcgcggtatgagccgatgtcatcgaacttcggattgcccatgccgatctcctcaccttgataaatgtaaggcgtgccctgcatcatatgaacggccgccgccagcattttggctgatttcgtccggtatacgccgtcgtctccgtatctggatacggcccgcggctggtcatggttgcaccagaataatgcgttccagcctccgcctttttgcatctccgtctgccaaaacgctaaaatccgtttcagcttcagaaaatcaaacggagcgagcgcccatttttcaccattcggataatccacttttaaatgatgaaagttaaaggtcatatcgagttctttattctcagggtttgtgtaccggatgcagtggtcagccgttgtcgaggacatttcaccgaccgtcatactgtcatatttcgaaaacacttcccggttcatctcatggagaaattcgtgcacgcgcggtccgtccgtataataagggcgcccgtcacgcccatcctcggcatcaggaaacgattggtctttagaaatgaggttgatcacatccagccggaagccgtcgatccctttccggaaccaaaaatgcatcatgtcgtagaccttttttctcatcttttcattttcccagttcaaatcggcctgcgacacatcaaataaatgcagatagtgctggcctgacgccgggtcgagctcccaagcggaaccgccgaattttgattcccagttgttcggcgcccggccgtcttcctttccgtctttccaaatgtaaaaatcccgatacggactgtcgggtgacgagaccgcttctttgaaccaccgatgctcgactgatgtatggtttacgacaagatccatgacgaccttgattcctcttttgtgcgcttcatcgagaaggcgttcaaaatcctccatcgttccgtattcttcataaatggtgcagtaatcgcgaatgtcataaccgttgtcattctgcggcgaatcgtaaatcggcgtaagccaaatgacatcaatcaaaagcttctgcaaataatcaagcttctcgataataccgttcagatcaccgatcccgtttcccgtcgtatcattaaagctcttcggataaatttgatataccgctgcctttttccaccatggtgtgctgtctgttttcatttttcttcaccgcctgtaatgttttgaattgaaagggaaaagggacagcctgatagaaggcgccccgcaggttttctatttttgccgtttcagccgcgcatacccgtatgttcccgcaaacgggagaatcagcacgatcagcattccgatcgcaaacggaccccagtacagactcataatggagaagattcccggcacgccgccgactccgaccgagcttgcgagaacgcctttgacggagatgaacatccccgcgattcccgaactgatcatggcgattacaaacggaaatttgtaacgcagattcacgccgaaaatcgccggttcggtaatgcccaaatatgcggaaatgccggccgtcagtgaaagcccccgctgttttttatcttttgtgatcagcatcatggccaaagccgccgatccttgagcgatatttgacaatgcgagcatcggccataaaaatgtgccgccgagctttgatccgattaattgaagatcgaccgcgagaaacgtatggtgcatccccgtgatcacaagcgccgaatacagccctccgtacagcaggcctccgatggcggagaattggccgaaaacggcaatcaatcccgccgtcagcgcgttaccgatcgcaaaggtgatcggaccgatgatgacaaaggatagaaaaccgatgaccaaaagcgtcaccggcgcgacgaccaacagctgaatgccctccggcgtccgtttcgtcaaaaagagctcaagcctggcaagtaaataagacgccagcagaatcgggagcacctgaccttgatacccgactttctgcacctcaaggccgaacaggttccacaccggaatatcgccgctctgctcggcagccccgtagccccatgcgtttaacagatcaggatgcaccagcatcagcccgagcacgatgcctaaaagcgggcttcctccgaaccgcttcactgccgaccagccgattaaagccggcagaaaagcgaaagccgtccccgcgatcagattaatcatattggcgagatccgcccattgcggatacacttggacaatcgatttggcgctgtagaaaatgccttccgccgttaagatattgttcagacccattaaaagtccggccgtgacgatcgccggcaagatcggaataaagatgtccgcaagcgttttcacagcacgctgtaaaggattcatgttttgcgctgccgccttcttcacgtcatccttggacgcttcacccatccccgtttccttcactaattccgcatatactttgttgaccgtcccctgcccgatcacgacttgaaactgcccgtttaccgcaaaagatcctttgacaatgtctattgcatcaagcattttttggtttactttggtttcatctattaatgcaaaccgcaaacgcgtcacacaatgagtcgccgcctcaatattttcgattccgccgacagcttcagcgatctgccgcgcagcccggttaaactcacccatgccaacccctccgtaaccgttttcattttgtctcacaaacttgtatatacatgtttatgactctattgtaatgatgtatatacatgtcgtcaatctatttttatagcgctttcatcacaaatatactgcgaaagaccctgaaacaaaaaaagccccgccggaaccgggccttgacttcttgttttatcgggaacatgtccgggcggaattcacaacaggagcacaaaaagcatacagtactgtacaactaagttaaagaggtgtgaagagatgccatccactgttatcaacctgtactatttgaagattaacagtatttctggcaacggatctattacgattggggaagcggcatacaacagtcccaccacaaataacaaatcacaaggactgaactcttcattcggcgatacgtcacctatagaatcgatgatggagaacttgttaaatgatcctgatgtcaacgaccagacagccatcggaaccgcagataccgcaaatattacgccggtgccgcccattatagattaaaggggtttttatgaatgccttaccaaattaacgtcgtcaatataaaagtaaacggagcaacgcaaaacggaaacgtcgatatcggtcagaccgtacaaaacagccacactgccaacagcaaatttgtcggcgcgaacttttctttaggggatttttcgccggccgccggatgtttgaattcgggccatcttgaccctgacgtgagcgatcaggatcagatcgccaacccgtcaatgccgatcgcaaatcaaatatagggaggttctgccgaagtggatatcgaaaaaatgagaaagtggcttgagattacgaacgagcacaagcccagcgacttttggaccaatgtcctgaaacggaaatctcccgaagattttttctccttacaaaaaaacaccctgacttatgatatttatcaggatgaacagcacacatttgtcattgtggaaatgcccggcgtttacgaagaagaattgacattgaggctgctgtctagaacacggctgcatataagaggaaacatcacacccctttttccaaagaacatgggcgtctgccaaaaccggtattacggggaaatcgatgagacgattgagcttcctgaaccggctgagccccacctgttacaggcgcagtgcgtaaacggcctgctccacatttcctacccgcgccttatggagcacattccttttcagaaaaaaatctaaagagccggcttacgggcggcccagccgtctgtacactttctccttataatgagaagatgcgggttttgagaacatggctttctcctccgtcagtttgtcgagtctgacttgtttttccgtccgtttgttccgcaggtgatcccgctcctgttcattgcggcacttggcgatcaaataatcgagcgtcatcagctctttcttcagcgcgccttcatcctcggcgatcccggcgttttttaataggcggtagcccattctgagcgattccggaagatgtgcggcatcgtctttcggcaagggctttcccattcctttgatgccggcaaactctccatccttaatggcgcgcttgattttatcttcagccacgatatgggcaatatccattactgttcacctcttttttcaatagaaaccgggtatgatcatacggaaacacaggtcccagtttgttccatttatatgttttaaagctgtcattcaacagatcaaccgccgttgcgacagcgtttttcgccctttttccgatgagccttttccaccttttctatttgctggtttcatggtatattgattacgttcgttttttctatcgttccgtgtaaaccgtgatcggaaaaaaggagtgtaacaatgaaaacatttataaaagaaagaggacttgccttcttcttgatagcggtcgtgttattgtgggtgaaaacatatgtcgcttatattttaaactttaacctcggcatagacaacacgatccagaaaatattgctttttgtgaatccgctgagctccagcttgttctttcttggacttgggcttcttttcaagaaaaaattacagcagacagccattattgtgattcattttttattgtcttttttgctttttgcaaacatcgtctattatagattctttaatgatttcattaccatcccggtcatgatgcaggcaaagacaaacggcggccagctcggagacagcgcgttctcgttaatgagatggacagacgccttctacttcctggataccgtcattttgattattttggcccttaagatgaaaaaaccggctgaaaaaccggcgaagaaatcattcagaatcgttttggcttccgccgtgcttatgttcctgatcaacctcgccgtcgcggaatccgaccgtcctgagcttttgacacgctcatttgaccgaaactatctggtgaaatacttgggcacgtacaactttacgatttacgatgccgtgcagaatgtgaaatcaaacagccagcgcgcgcttgccgattcaagcgatgtaacggatgtggaaaactatatgaaggccaactatgacgtgccgaacaacgtctacttcggaaaagccgaaggaaaaaacatcatctacgtctcattagagtctctgcaatcctttatcattgattataaaattaacggcaaggaagtgacgccgtttttaaacaaactggcgcacgataatcaaacattctactttgataactttttccaccaaacgggacaaggtaaaacatctgatgcggaatttatgatggagaactctctgtacccgctgtcgcaaggttcggttttcgtcaataaagcgcaaaacacgctgcagtccgttcctgcgatcctaaaaggcaaaaagtacacgtctgccgctttccacggaaatacgcagactttctggaaccgtaacgaaatgtacaaagcggaaggcatcgataagttttttgattccgcttattatgacatgagcgaagaaaacacgaaaaactacggcatgaaagacaaaccgtatttcaaagaatccatgccgctcttaaagagcctgccgcagccgttctatacgaagttcattacgctgtcaaaccacttcccgttcgggatggataaagaagacacggacttcccggcgggagactttggcgattcagtcgtcaataattacttccagtccgcgaactatctggatgaatcaatcgaacagttctttcatgacctgaaaaaagacggcctgtacgataagtcgattatcgtgatgtacggagaccactacggcatctccgaaaaccataataaagcgatggcgaaagtgctcggcaaagatgagatcaatgaatacgacaatgcccagcttcagcgggtgccgctctttatccacgctcccggcgtgaaaggcggccgcaatcataaatttgccggtgaagtcgatgtcgcgccgaccgttcttcatctgctcggcgtcgatacgaaagattatctcatgtcaggttcagatatcttatcgaaagagcacagagaagtcattccgttccgtaacggagacttcatctcaccgaactatacaaaagtgtccggcaagtattacgatacgaaaaccggaagacttttagatgattcagaagtcgacaaaaaagaagactctctcgtcaagactgagcttgaaatgtctgataagatcatcaacggcgatctgcttcgtttctatcagccgaaaggctttaagaaagtggacccttcacaattcgattatacgaagcgtgaagattcctcagcagatgatcaaaaagaataaacaaaagccagatcatatcaatgatctggcttttttatgttcagctcccggcggccatagtgcgcttttgcaggctgtcggaaagaactgaataagcgacgactttctttttctgctgtttgacgacatctacatggtcttcgtagctgtatacaaacaccgtcacatctttttttccttttctcgtcttaatgacaagcggatcggctccgttttgcggatgaagataacgctcttcatcccctgggtatatataatgccgttcgataaacacggcttcgttaaaatcatcaatcacccggcgtttgtcttcgccttccagacgttttccgccgagggaaacggccgcggacgcgtcactgagcttcgaatgggtttcaaacttgcggagaatccattccaccgctccggtaggaaggcatgtcagcacaatcttaatcaggcttatgacaacaattgaaacaactgcaatccatgtcaccttacatcatctccatacttgttctacatgaatcttaacatagaagaaaacgttgttttttgtacattatgtgaaacttgatatttgttcaaaaaaaaaccggatcacctatgtgatccggttttttcaagtctgcttctggtcgtcacggcggacggcttctctcagctcttccgcgacaaattcgacgttcggcccgataatgacctgcgccgttttattccccgttttgataaccccttttgctcccgcttttttaagcgccgcctcattaatgagagacgtatcctgcacggtcagtctgaggcgggtcgcacagtgatcaatcgtttcgaggttttgcctgccgccgagccccttgagcatggcatgttcttcgacggaaccggccgtatcttcactaagcacttcttcctcttcctcatcatcttcccgtcccggcgttttcaagtttaacgttttgatgagcatatagaagacgacaaaatagatcaccgcataacaaagcccgacaacgagcagcaaaagcggtttttcggcaatcccgtagctgaggagataatcgatcgcccccgccgagaatgaaaaacctgacctgattccgagaacattcacgataaataaagagaacccggttaatatagcatgaaccccgtacaaaagcggtgataaaaacataaatgcaaattcaatcggctctgtaattccggtaataaatgccgtcagcgcgagaccgatcatcattccggccgtcgctttacgcttacttggcttagccgcggcaatcattgccagacatgcggccggaagcccgaacatcataatcgggaagaatcccgtcatataagttcccgccgtcggatccttcgcaaagaagcgggccagatctcccgtttttccgtgaaaatcgccaaattggaaccaaaaaatattattcagcacatgatgaagaccgaacggaatcaaaagccggttaaaaatcccgtaaatcccggcgccgattccgccaagcccgatcatccattccccgaaggacgtaatcaccgactgaatcggcggccacacaaacccgaagacccccgccaaaataatggtgatcagcgccgttacaatcggaacgagcctgcgcccgctgaaaaacccgagatattcgggcagcttcgtatccttaaagcgattatacgtgtatcccgcaattaaccccgcgataattcctccgaaaacggccatattatttgtcgaattgattgattttacagccgcgtccagcatgatataagaaattgctcccgacagagcggcggccccgttgctgtctttggaaatcccgatcgcgattccgatcgcgaaaatcagcggcagatgatcaaataccgcggtccccgccgcgtaaatgaacggaatatttaataagtcctctctgccgatggccaaaataataccaacggcgggcagaacggcaatcggaagcataaatgattttccgagtttttgcaaaaattgaagcattttacccatcccccttcttttttcttaaatataccacataagttatctagtgatctataccaattttccttcatttattcacataaggcttgttggttttctatttataaaccagttgtggtaagcttgaatcagatgattaaaaatagaaagcgggaatgacaatgattgtaacgaacgatcaagaattagaaggccttaaaaaaatcggcagaatcgtcgcgctggcgcgtgaagaaatgaagaaaaaagccgagcccggcatgagcacgaaagatcttgacctgatcggaaaggcggtgcttgacgagcacggagccgcttccgctccggagaaggaatacgatttcccgggcgtgacatgtatcagcgtaaatgacgaagtcgctcacggcattccgagcgcctctaaaatcttaaaagccggagatcttgtaaatatcgatatttcggcggagttcggcggtttttattccgatacgggaatttcatttgtactcggagaaggcgatgaacgtctgcaaaagctttgtaactgcgcagcatccgcatttcagaaaggattggatcaggcaaaagccggcaaacgccaaaaccagatcggcagagccgtctaccatgaagcccgctccaacggatttaccgtcattaaaacgctgacgggccacggaatcggcagaaacctccatgaagcgccgaaccacatcatgaattactacgatccgtttgataacgcgcttcttaaaaacggaaccgtgatcgcgcttgagccgtttatttccacgaaagcggaaacgattgttgaaacgggagacggctggacgtataaaacgccggataaaagccttgtcgcccaagtggaacacaccatcgtgatcacaaaagacaaaccgattattttaactgcattgtaatgtttcatctcccttccaaacaggtatacaacaactaacccgaaggagggagacgcatgaaaaaagataaagaaaaaatcaaaatcgaaaacgaaatacacgccatgcacggcgtaacgaaacagcagattttagaggatttcgaggaatttaaggcgtaccttcatcagaaaatttccgccggaaaaaaactgggtctggatgacagcaaaatcattaaaagcgccgccatcctcggggactatctcgccaaacacgaggagccccgcaatgcggaagaaaaactcttacaagaactgtgggacattgcggatgacaatgaaaaacaccatttggcccagcttctcgtcaaacttgccggacactgatacagtgcccggcttttttatgctccgttataagagttgtgctacactggacatatgtctgtgaaaggagccatttttcaacatgtggtttattatcttcgggtttattttctttattgaaagcatcattctcaccgtttacggagtgaagaaaaagaaggggatgctggtttatttcggcgtcgttttcggaatcatgacactcggaacggtgctgttaaaattaaccggccattaagcatgaaaagaccgccctttacatatatatgtaagaaagctttacatctctgaatcgaaagtctcagtttttgcgttatcccttttcatcgtctttttatagatgttacaatgccaaaagtttggcaaaaactgaagaaacctccccagcgggagaacggagaaaggagttttctgacatgcattatggcagtaaaggctggtatgtagaagagttaaagaaaaaaggaattacccactatgaaggaagaaagcttcaaagcttcaaaaagtacttccttgccaatctgctggaaacaaaaaaacaagcataacgtaaatcagccgtgctgtcagtgcagcacggcttttttctatacattagtgagcctgtctctttttttaaggaaggactccctccagctttctgacagcgcttcttcccgcagtatttcttcaatcgctgacagattgccggaatcacgatatttcacttcattcgcataccagacggaaatgctttctttgcctctcgacagacgcttgaggacgggacgcggatcgacatatccttcttcaagcaccctgaaataaaagccggtaaatcccgtctgctgtacacggagcaccatatctttgatgccatatttgagcgcgagtttgacgcagggctggcgcggctggcttacttgaacgacggcttcccccagctgaaagacgtctccgatccacacgtcttgttcggccagtcctttgaccgttacattctccccgaacgcggcggcgggaagttttctcgcgagcgttgtttcccaatatgaataatgctcggcgggatacacgcacaccgctttatcggggcctccgtgattcttcagatcagcctgcccgtccccgtcaaaatgggttttatacagcatgacgggaaaatctgcgggccgctttatgatgccggaattgatttgtctgccggcaaattcatgaattgcgggctttccgagattgatagataagacagaatagtcttgcgtcacctcgttcacatcctttgcgaaatctcatatctttcctttatcatagtaagaaaaaggtggtttttccatgcttcaatatcatatgattgcagacggccgggttcagggcgtaggttttcgctacttcgtccagatggaagccgacagacataagatagccggctgggtaaaaaaccgtgatgacggccgggtggaaatccttgccgaaggtcctgaagagtcgttaaaacaatttgccgaagcagtcagaaaaggcagccccttctcaaatgtcacaggcgtaaccatcgaagaatcacaccgtctgaaagggtaccgcaccttttccatcagttactgataaggcttgtcctgataataataattcggcttcacaatcgtattgtcatatgatttatggaaaatgtgggtggaagccggcgagatcggcggaatcagccaggtccagtcgcccgtcagctttctgcccgcgtcttgttcctgttcttcgaagcgtttaaattgattcgccgccgtatggtgatcgacaatgctgacaccgtgttttttgtatgaatagagcacagccttattcagttccaccagcacctgatctttccacaggtcggtattcaggctggcggaaatccccatgaccgcagcagcttttttgagcatatcataccgtttttcgtcagcaaggttccttgcgccgatttcggttcccatataccatccgttaaaaggcgccgcgttgtacgacagtccgccgatttcaagcctcatatcggcgataatcggaaccccgtaccatctgagatttaaatcggcaaactcttcaatatccggatgggtgatcggcacttctttcacgagcgtctgaggcaggtcataccagaccggctgcccgtcccctttcatccggaaaagcagcggcagaatatcaaaatcggtccgcttcccgcgccagccgagtttttcgcagacagccgtcagctcatatgatgccggatcaccgactcttcctttttcagtctcatatcccgcatagcggatgagctggtgattccagatttccacttgtttctccccattcttctcaggagggaaaatcgtaatcgtcggtttaatttttccgccgttcgtggcgatttcaatatgttcaaataatgcgtcgcgcacctcttctttcgtgttcacaccgcgccggtcaatgacgttcagcgattgccagaacagacgcccgatacagcggttgctgttgcgccacgccattttcgccccgtgttcaagctcttccgccgtatggacgtaacttcccgtccgatctatctcatcttttatcgcgtgaagacgcgcgttgatttgcgattccattccgagttcctgatagcagacatcaataaaatccttcgcctcatcccaaagtatttccgtatgtttcaaaaaactctctccttcaatttacatctgtttcccattgtatcgtttttaggagtgaacacaatggtttttttgtatcatactggaaactgcatagaaaaaacacctgtgattttcgcaggtgttttacaaaacggaatgcagtttttcagccagtgtaagcaaatcttcacggtagttttttcccgtcatcggaattccgtgacccgtcaaaagcgcttccggctccagttcggccagtttctgaacggacgcggccgccgtctgcgtatccgctgtaaaataggcgggcggcccgtgaagctcttgtttttgaatgacaacgtccgcaagcgattcctgttcaacagtgatcacggcatcaccggcaagcagaacgcggtctttatcccggaataatgaaatatggccgggggtgtgaccgggcgtatgcacccatttccattcttcaagaaacggaacggtaccgtctgaaggcagtgcctgaacggacggaatgcggatcgtatggcgcggaaacagcggtgacagctttgcgacaagcccttttttcgcatcgggcctggcaggcggataatccgctttccccgtgacgtacgggagctccttttcatgaatgtaaaccggcacatcccaaagctcaagcagttcttcaatcgcaccgacatgatcaaaatggccgtgtgtcaaaatgaccgccttcagctgatacccctctttgaaccggcgcttcatttcttctgttatcatctccgccgattgaggcattcccgcgtcaaccagaatgatttcccgcggagctgagggattttcgataaagtaaacattcgcaatctgcacggtcagtccgtaaacgccgtccgccgctttaaaaccggcgccgcttctcactgaaaaaagcggcataaacggatcactcatcatggcacctcctctgatgcctttagtgtgcgacgaaccgggtgttttatgttaaaaaatcgtgattgcgccgatgatgagcgcaaaggccgtcatgacgataacggcaagaaccgcccatttcatcgcaaacttctggtgctcatcaatggtgaccccggcaagcccgactaataaatgcgtcgacggcacgagcgggcttaacatatgaatcggctggccgatgatcgaagcgcgggcgatttccaccttatcaacaccgtacgccacggcggtctcggataaaatgggcagcacgccgtaaaaataggcgtcattgggcatcagaaacgtaaagataccgctcgttaaggcaacaatcgccggaataaacccccccatctgttccggaataagcgatacgagggaaatggccatctcatcaaccatcttcgtccccgttaaaattccggtaaacacgcctgcggcaaaaatcatcgaaccgatcgcaagcacattgctcgaatgggctgaaatacgctccctttgatcgttaagcttcggatagttgacaatcagcgcgatacaaaacgcaatgatgaacagcacggttaaattcacttttcctgacactaaaaatcccactaaagaaagcgttaacagtaaattgaaccaccatagtttcggccgcctccattcatctgccgcagccgcagccgtttcatttgtatgggacggctgctttaattcgatcaccccgagccgtttcctttccatccttccgagtacataagcgaccacaatcatacacaccattccgctggcaatgacaggcagcatcggccccgtcagctctgccgggtcaacgccgagcgcactcgccgcacgcggcgtcgcgccgccccatgggatcgtattcatgatacccatgccgacaccggcgattcccgctaaaataatcggacggattccgagcataatatacaaaggcagcattgcgcttgtcgtaatcatatacgtcgtcgagccgtctccgtccagtgcgacaagcatggtcaaaacggctgttccgactacaattttgagcgggtcgcctttaaccagctttaaaatacgcgacaccatcggatcaaataaaccggtatcgatcataatgccgaaataaagaatcgcaaacataatcatgactgcgatcggcgccacctgttcaataccggagatcatcatctcgccgacccggttaaaagaaaacccggcaatcagcgcaaacacgatcggcgttaatacgagcgccgttaacacggaaagccgttttgtcataatcagcaccataaaaacaagcatcataagaaagcctaagattgctaacacagtatgtcccccttattatgaatacgcttacattttaaaggcccgatcccctttatccgcctttttgctatcttatgagaattagatattgaagtaaatatttaggattttaaagatttttaattttttataaccttttcgttcattttgttcatttataaatcaaaagcctcccgcaaatatgcggaaggcttatttttcgctgctcatcatctctttataaaactcggtctgctcttctaaaaagcgttttgcgccgctgctgtttttataaaagctctcccaatcccgttttttcaacatttgcttccactccgcggatgaggtaatctgtttcaaagcctgatcccaataggcgatctcgccttcggacatgtctttcggccccatgatgcctctccagtgcgcaaagacaaacggcaccccctgctctttccatgtcggcacatcgctgaagccggagagccttttgtccgacgtaacggccgccaatgtgattttccctttccgataggcgtctctcgcttctgaaatggtcattgaggcggcgtctatctcgtggctgataagagcttcaatgacttcattgctgctcccgtattgaaaaaagcggatatcaaacggagaaattccggccatttccgccgctctcgcaaaggagagctggtcatcatttccgaggccgggcgcaaatccgatttttatgccgcccggatgtgctttaatatcgccgagcagccgctttccgctttttatctttgaatccttcggaagagcgacggtctgccactcttttgcgataatggccaaaggcgtaaaatcagctgccttcagccggctttgtcccaaaatttcattgcttaacagcaggcttgaattcatactgatgacatccgtttttcgttcgtttacatatttccagccgctgtctccgcctccgccgggtttatagacgatctttacgggccggcctaatatttgcttccgctctattaccgattgcaacgcttttgccgttacgtcccagcccccttgaggcgctgccgggacgacaatttcaaccggcccttcagctgaacggatgcccgccatctgccgtccgtcaaaagaaaccagcgccgccagcatgacaagaagcactcccaaccgcttcatttctcccatcccttattcatgtgctaaataatatttccgttccggcctgccgataatgccgtactctaattcagcgagcgcttcttcccgagaaacgagaaactcggcgtagcgccgcgccgttgttctggaggcgcccattttttcgcccagttcttcagccgtcatccctttttgggcttccctgagcgcgtttttgattttttgaagtgtaatcgagttaatcccggtcggcagatcattgagctgtttttgttctttctgaccgcttccgaaaaacatgtcgataacggactggctcagctccggctgtgagtgcagccattctcttttttcccggtactgcaaaagcacttctgtaaatttatgtgccgacaccggctttatgacatagtgggaaacgcctgatctgagcgcttcctgcaggagtcttgtttcggcagaagccgtaataatgatgatatcaacggaaggaaaacggccgcggataaggggaagcagatctgtccccagctcatccggcatataaatatccaaaagcagcagatcaggctgccgtttctcaagcagcgatatggtgtctttggcattgattgctttgccgatgacattgaatccatcaagatgttcgataaatttttcgtgaatttgcgctattcgaaagtcgtcctctgcaatcgcgatgttaatcacaccgattccccctttggcctttctttcggtataaacaccgtaaatacggcaccgccgctcttttgctgcgaaatctctatcgatccctgcaattcactgacggcttctttcagattggctaagccgtatcctctcctcgtcccctttgaagagtagcccttttcaaatatcgtttctgttttttcctgaggcacgccgtctcctgaatccgccacttcgatgacgatatccctgccgatatcggtcataaaaaaggcgacctcttttttctctttttcggcgacggcttcgaaagcgttatcaataagatttccgatgatcgtaatgagctgggatgaacccacatgctccggcagcgattctaaaaagctgttttcatctattgaaagctttactttcttctcagacgcctttcccatttttcctaatagtatggcctgaacccgctgtgaatgaatgttttgaaagaggatttcgtgctgttcattctggatggcgtactcttcttttatcagttcaatggcttcattatattctcccagctctaacagaccgaggatcgcgtaaagcttattcgagaattcatgcgtttgcgcccgaagatcctccgagtattttttcatttcagtcagcttgttaatcagtttcttgagctccgttttttcgcggaagctgatcaccgctccgtatacttgcccggtctgcttcatttctttcacgtttaagataaatactttatctccggcacgcacctccacgttcggcggtaattctccccctgccaaaaccggcatgagatttgcgcccggcatgatttcttttatatgccttccgatcatcggttccggaagattcagcatatcagccgcagataaattcatcatggttaccgcgccttctttgtttacggcgataatcccttctttcatcgcaaggagcatcgcattgcgctcccggtacagcgctgcaatttcatgcggttcaaggccgagtgtatctttacggatgctttttgcgagcgctgccgctcccccgatgccgataagaaacaccaagcatgcaaaatagcctaaatgccgcagatgcgctttcatatctttttctatctcatcttgtaaaaactcgactgtcaccgttccgacgacttcgttatgatttttttcctccagaataaccggggcgcttccccggacggccgtcattccgtcggaaaccggagacccgccgaacatgacggttttgttttgcagattttgattttctttcgggatgctgctgcgggccgaatgaaatgcaacatgccctttttgatcagtaatatagacagcgtgcgcgcctgcctgttctttcatttgttcaatgacgtctaactttgcaaaagcttcttgatccgcaagccggaatgcctcttttacaggaggcatgtatgaaatggtttttgccgtttgcaccgccagctgttcagcctgcttctggccttcctttaattgctgaaaggcaaatataacagtgagcgttccgatgacaagtattaataaagccgtgattaatccggcgattttcatttgcagagagacataaaaccgcttcgcttccaacacagcaccagccgtcctttcctcctaaaatcataccactttttaaatctttgtttctcatttttgagaattttcgtgatctttttctcttgtcatttctttcaaaaagtgcagtctggtataatttccctcaagggagataagaaggatgaactttttataatcgctgcgcaaaaaaaagactgacataagccagtctcgggatgtttaacaacggacatatattcaggttgacaaagtgtttctctatgatggccgagatacatttgaatgaccggaaatatcaattaattttcctttgacggccaggcgcccgtctgttcttaccgctttgtcgcatgtgattaatgtaatctctttatcttttgtctcctgaattgcgtttgcttctatttctgaaatcatggtttttgatgttacagaataaatatagtcttttctaaagtcggtaatcacgatttgcgcgcctttttttatgtgtaaaagagggccgaacaataggttctcctgcttcagatggtggcctgccaacgggtagtttccctcgcccattttctgatccggacgcatagttgccgcgccgatcagcaggttttcattggttgtgccttttaaaatcggaaggtctaaatcgatgctgctgatggttatccgtccgattatcggttttggtttgcgattaaaacttgactgaactgtttccctgaaaccgggcggatgaatggattcaaaatcatagtccgcttttttcatgttatttttccgcgcttgttctgcggtcaattccgattcaatttggcttttactgaggtacgcgatcaaacagcctttcatgagaggagaggaaatgagaagcagcccggacaaaataagaacggcaatgatcatttttttaaccatgaagaaaattcctttcttgtacgttatgcggtgagtatttggtgagaaatgattctctttttaaaaaagcacctgatcgattcttacatgatcaggtgcgataacgtctatctattccttgctttcttctttcttgatacaacagccgcggctccgccggctaatagcagcagaataccggccgtgaccggtatcataccgtccgtatcaccggttttcggcaggtttttgcctgtatccgagtgattggttttaccattggtatcagggtgatgcccgccttgattcgtttgatgattcggtgtgtctttcccaggtgcgggattttttaatttcttattagaaacgacgacctcaacagcttttgactgtcctttttcaattgtgaattcaattggtttttcgttcagctgatagccgtcaggcgcttttgtttcgataaattgatactgcccgggcgccaatccttccaccgtaaaccggcccttttgatccgtcttccataccgccggccgttctttgctgctgccggtgtttaccggatgtccggcagaatccgtgatcttgaattcagcaccttccagcaccttatttttatcgtcatgatccacttttgtcagtgtgacatcaccaggcgtcagtgtattctccgcactgatttcgactggttttatgtcggtatttgtgatcttgaatgatattggcgtttgatccaaactgtaaagttcaggcgcttttgtttcgataaattgatattcgcctgctttcagtccccgtacgataatctgtccgtgctcatctgtcgtcagaccttctctcagcactttgccgtttgcatctgtcagattaaacttcgcaccttgcaggactttccgtttgtcaccttgatccaattttgtgagaacaacgctgttcttgatgttaaccgcagtcagggcagcctgattcggttttccgctgttctcagtcttaatcgtaaacggcgcaggggttgttgacagcagataaccatccggcgcttttgtttcaacaaattgatagtttccgggcgccaaaccgccggcgtcaattttgccgccttcttttgtcatcagatcgtctcttacggtttttccatcactgtcaatgattttaaatactgcaccgtctaaaacgtttccgtcttgatccttcttgatcagctggacagagccttgatagttgacaaaggtgccggcgtcagacggcttcggcttgccttccgctgtttctgagatggtaaactccactttctccgtatttaacacatagccgtcgggcgctttcgtttcaatgaaggcgtaatgccccggtgcaaggccggatgtttctactgttccgtccttatctgaaaccagatcttctttaaccgtttttccatcactgccgacgattttgaagactgcgccttcaagcttcttgccttccgcatcttccttcgtcagccggacagagcctttatagttgacggccgttcctgcgtcagttgattccggctttcc

SEQ ID NO: 36 - DNA, 59788 bp, Bacillus velezensis
  source 1..59788: mol_type = genomic DNA
cgcacatcgctgtgcgatttatttaaaactttgaattaacaggtacgttttgtcttgtttagttttcaaagatcatttcaacctcatctcgaggcgactttttcagtataacatttcagcgagttgctgtcaaatgtttttttgtttttatttctccgccgctgtgagctttttgttgaagcgcatcagcgacgtttaataatataccatgcctatgattcagcgtcaacactttttttgaaagaatatcctcgatgatatacttcctgccctttggtctctatttgagatacttcaacaaagcctttttccgtcagataatcaagcatgacaccgagatcttgggtgaagtgcaccagttcagggtgctgaagcaattctccaaactgccacatttctttttctttcatcacttgaaaaaggtgcgcagaaccgatttcagcttttgaatggatgagaaaatcatttgctaagaataataattcgagccttttctccaaactttcgtgactctcgacaagttcggaatatagcttatatacctgcggctcaatgtgacgaacctggttccagactgtcgtttcgggataaaatccccggtcaatcacttcaatgcgggccaagtggtgaagagcatgcactaccgcataatatgcatccagaaaatgatcagcttcaaaaaacgcttttccttctacaaatcttctgatcagcttgccgtattccattccgatctttaatttccgctcggcgaaaggaaaagtgctgagccgatcattgagttcagatatatattcattgcggtcaaacagcactttgccgttgatgatccaatctatgactcttctattggtcccaagcagaatccattcctgaagcagagcatccgttacaatatgtaaagaagcggttttttgttcgaattcataatgctttataaaaagaggttcatcagcctgtttgacaatgacaagcatgaccgcatcaaagttatccgtgatggatgatgctttactccttctctcaatcataaggacggccagcgtatcgggatgacttgctctttcttggtaaattggacggagaagattgtccattacgattcctccaatgcgattgtttcactagctattgtttctacatttctatgataaaacatgaaagtccttttttctaaacacattgcactattataacaaatttcctttcaggtgccatatttattcttcccttttcttacgaaaacatgaagaatatgccatctgttttgtgctatagttaaacgagagggggatggccatggcgaaatactcaagcaaaattaataagatcagaacgtttgcgttaagtttggttttcgttgggtttatcattatgtacatcgggctgttctttaagcagtctgttttgcttgccagcttgtttatgattctcggcctgctgtcgatcgggctcagcaccgccgtttatttttggatcggcatgctgtccacaaaagcggtccgggtgatgtgccccgcttgcgagaaagaaacgaagattctgggcagagtggatatgtgcatgcattgcagagagccgcttacattggataaaggattggaaggcaaagcgttcgatgagtcttataacagaaaaaacagtgtaaaataaacgaagctgaccgtatcaaagcggtcagcttcgtttagtggttttcttttttggaacattcttggcagacgccgtaaatctccaaacggtggtggcttaccttaaacccagtgacgtgagccgcaagctgttctacttcgtcaagcccgggataatggaagtctacgatttttccgcagctttcacaaatggcgtgataatggtcagaggtgacaaagtcaaacctgctggacgcatctccgtacgtcagttcctttacaagccccgcttcccggaatacacgcaaattgttatacactgtcgcaacactcatattagggaatttcccttccaaagctttatatatatcgtccgctgtcggatgtgccatagaatccactagatattccagaatggcatgacgttgaggagtaatccggactcccgtatccttcaacgtgtctaaggcttcttttaattcatgtgcagccatccgtcatgcacctctcttctaaaaaagattcttactttataatgtttataattagtgtacatctttttccggtctcctgtcaaatgtaatctgaagaaaaccccgtgagttcagcatttgtccattaattagacgcaatttgttccaattctcgaagtgcctcggcaacgtgatctttcacttttacctttctccactccttcacaagacggccttctttgtctaacaaaaaagtggatcgctcgatacccatatattctttcccaaaattcttcttcagcttccacacatcaaaagcttccgccaatttgtgctcatcatcaacgaggagctggaaaggaagatcgtgtttttgcttaaatttttcatgtttatcacggctgtcagggcttactccgatgataaccgcattaagtcccgcgaaactttcgtgctgatcacggaaatcacatgcttccgtcgtgcatccgggtgtcatgtctttcggataaaaatagagaacgacgtacttccctttaaaatccgtcaatgctacttcttccccgctgtcattcactaatttcatatccggtgctgtttgtccgatttcaatcgtcatttcttatacctccgggttttttattaagcgtatccaattcacgttaagattacaaccgttatccccccgctcttttctggaagcatgaacccgttgtgctcgcaatgaagcatgctacaatagaacatgatgtaaggagatattaggagggtcattttttgtatacaaaatcagttgaacttcataaggaagcgttagagcatatcgtcggaggcgtgaacagcccgtccagatcctataaagcggtaggcggcggttcacccgttgcgatggaaaaagcgaacggcgcttatttctgggatgtagacgggaatcagtatatcgattatttagcggcttacggcccgattattaccggacatgcccacccgcatattactgaagcgattaaaacagcggctgaaaacggtgtgctgtacgggacgccgaccaaacatgaggtcactttcgccaaaatgctgaaggaggccattccttcacttgataaagtacgattcgtaaactcaggcactgaagcggtaatgacaacgatccgggttgcacgcgcttatacaggccggacaaaaatcattaaattcgcaggctgctatcacggccattctgatctcgtacttgtcgctgcgggttccggtccgtctacgctcggcacccctgattccgccggcgtgccgaaaagcatcgccaatgaggtgattaccgttcctttcaatgacattgaaagctacaaagccgcgctggataaatggggttcggaaattgcagcggttctcgtcgagccgatcgttggcaacttcggcatcgttgaacctgaagaaggatttttagaacaggtaaatgaattgacccataaagcgggtgcgctcgtcatttatgatgaagtgatcacggcgttccgttttatgtacggaggcgcgcaggatcttcttcaagtgaagcctgatttaacggcgctcggtaaaattatcgggggcggcttgccgatcggcgcttacggaggcaaaaaagagatcatggagcaggttgctccgctcggcccggcatatcaagccggcacgatggccggaaacccggcatctatcctatcaggcatcgcctgcctggaagtgctgaaggaagaaggcgtttatgagcggcttgatgagctcggcgccagacttgagcaaggcattctcgcccatgcggagacacatggcattaccatcaccgtcaaccgtttaaaaggcgcgctcacggtttacttcactgatgaaaagatcgtcaattacgagcaggcggaaaatacggacggagaagcattcgccaagttcttcaaactgatgcttgagcgcggcatcaatctcgctccatcgaagtatgaagcttggtttatcacaaccgcacatactgaagaggatatcgacaccactttacaagccgttgaagatgcgttcagacatatgaaaaaataactgctgaaacaagcgggagcccggggcttccgcttgttctttttgtacgatttgtgagataatggttttttcaaaaaaaagaccttgaataattggtatgatccctgtatattactttattgtttagcaaatcagccgacagggaaatgtaagtgtcagccgttcgttcggcacataatttattagagaaaggaatgcacgcacaaaccaatgaaacttggtgcccgcatttttaaaacagggattgcgattacgctcgcgctctacttagcatcatggatcggacttccgtcgccgatctttgccgggattgcagctatatttgccatacagccctctatttacaggtcttttcttattattattgatcaggttcaggcaaatatcatcggcgctgtcatcgctacggcattcggactgattttcggaccgagtccgattatgatcggattgaccgcagtgattgtcatcacgatcatgttaaaactgaaaattgaacacaccatttcgattgcgctcgtgacggttatcgcaattttagaaacaccgggaaacagcttcctgacgttcgctctgatacgaacaagcaccgttattttaggcgtgctgtcttcttttattgtgaaccttgtgtttcttccgccgaaatacgaaacgaagctgactcatcatacggttgaatataccgatgagatcatgaaatggatcaggctgacgatgcgccagtccacggaacactcgatattgaaagaggatattgagaagctgaaggaaaagatgatgaagcttgatcatacgtaccttctttataaagaggagagaagctactttaagaaaacgacgtatgtaaagtcgcgcaagcttgttttattcagacaggcgattattacggcgaatcgggcgcttgatacgctgaaaaagctgcaccgctatgaaaacgagatttatcatatgccggaggaatttcaggagacgctgacagaagaaattgattatctgcttcattggcacgaaaggattctgatgcggacggtcggcaagatcaaaccgcatgatgacgatgctgaagaaagcataagatataaacagcttttgacgaagtctttcttgaaaaatcagcagaactgcgaggatgaactgcttgattacaatatgctcagcattatggctgcggttgcggaataccgcgagcagctggagcatctcgatacattaattacgagttttcagacataccacccgaaagacagcgaattagaaacagacgaagagtaacccggtgcttccgtaaaaccgggtttttttgcattcaaaaaaacttatgccgcccattcagacggcataagtttttgtatcagttcaaattctgaatcgtaaataagtgtctatactggccgccttgggccattaattcctcgtgcgtgccggtttcgacgacggcgccgttttccatgacgacaattttatccgcgtgcgtaatcgtggacagcctgtgggcgacgataaatgtcgtccggtttttcgcaagcttttccatcgcttcctgaatgtagtgttcactttcaagatcaagagccgatgtcgcttcatccaagattaacagcggcggattttttaagaatacacgcgcgatggaaatccgctgtttctgcccgcctgacaatttgacgccccgttcgccgactttggtttcgtagccttcggggaaattcataataaattcatgggcatttgccgctttcgcagccgcaaccacctcatccagagacgcgcccggtttaccgatggcgatattttcacgaattgtctcactgaacagaaacgtatcctgaagcaccattccgacttgattgcggaggcttctcgcttcataatcgcgaatatccgttccgtcaatcagcaggctgccgccggatacatcataaaaacgcggtatgaggctgacaagcgtcgattttccgccgccgctcatcccgacgagcgcgacggtttccccttttgtcacctttaaggaaacgttctgcaaaatcgtttcttttccttcctcataacggaacgagacatttcggaattcgacttcgcccttaatgtcgtcagcttttactgcattcggtttatcagtcagttcatacggctcgtcgataaattcaaatatgcggtccattgaagcgatcgactgggtcagcgtcgtcgatgaattgatcaatcttctgaccggattgtacattctgtcaatatagccgacgaacgcaaccatcgtccctaccgtcagcgggccgtttatgacaaaataacccgcaaacgcgataacaagcagcggcgccaaatccgtaatggtattcacgactgcaaacgtttttgcgttccaattcgtatgacggatcgctctgtccagaaaatgtccgtttttttcatcgaaattggcttgttcataatcttcaatggcaaaacttctgataacgggcattccctgaactctttcgtgcaaatgtccctgaacttgggcgagtgcctgagaacgctcacgtgtcagttttcggaggcggccgtaaaagtatttcactgaaattccgtataacggaaacaaaatgacagatatcaatgtcagcttaacatcgagtgtaaacataatgcagatgacgatcagcaccgtcatcatatcaagccagatattcatcagtcccgttatgacaaagtcttttgtctgttcgacatcatttatcacccgggaaatgacttcgcccgttctcgtgttggcataaaacctcaggctcaatttttgaatatgatcaaacaatacccccctaatatcgtagagcacccggctgcccgtccattgcgcgaagtattgccgatagtactctaccgggggacgcagaattaaaaacagcacgaacatgatgcccattatcgtgaatagcgatgatgttttagcgcttgccgttccgctcccttgaataatgtcatcgaccacgtattttaacagaagcgggagagccagcgggatggagaattttatgatgccgattaacactgtgataaaaatttgttttttataaggttttacaaattgcatatagcgtctgattacgcccacactttatccccctctctctttaaggcgtgtgagcccatgtgaaaaacctgttgacaccccaacaggttttttattgtatctttattttgtatagcgcagataccgttcataccacatatcaacaaattccggagcaaacggtcctttccgctgatgaatccagtgcagcagcgtattcagatactccttcagaatgctgtcgatctctttagggtaattcattgatttgcggtggtcatcgtattcatcctcgtcaagaatgttatacgtcatatccggaaacaccttgacatccaaatcgtaatcaatatatttgatggcctctccgtcataagcgaacggcgagctgatgttgcaataatagtgcaccccgtcatctctcagcattccgatgacgttaaaccactgacgggcatgaaagtagcagatcgccggttctctcgtcacccacgtccgtccgtcggattccgtcaccattgtccggtcgttggctccgatgatacacaattccgtactttttaaaatcgtcgtttcattccaaattcgatgaagcagcccgttatgcttatagctgtgaatttgaatggtttctccttccttgggataccccatatttctcccctactttctgtaaagccctgcagtcaatgcagccgcaattgctttccgacaagtcttttcactattataacgttacgaattaaaaaatgaaaataaaagaaccactccgcttccggaatggcacattcatttctgcacataggaagacggcttttccgtgctgcgataagactggatgacttgctctgtctgcctttggaataactcctgtatgccggccaggtcttttcgctttgtcgcaatttcgtcctgtacattgtccagctttgcatctctttccagactgatgagttccgcttccacctgccggcagcggtcaagttctgactgcagctcgagaagctgatccatgattttcatctgttcacttacaagcttttcaaactctgacatcgggttcctccttaggcttttaggttgatactccttaccatttcgattttccgccggaaaaccctttgactcattctgtagaggaatcacaagttttgtcgttttggcaacaaaaaaaagcacttcatccgaagatgaagtgctttttcgtttcagtgattagctgttttgttgtttgttttgttcagcagattggttttgctttcttacctgctgcacatcagtttcactgccgaattcagtgccgaattgaccctgaccggaagctgattgctggttttgttttttcacctgctgaacgtctgttttgctgaattttgagtttgccattgttatcacctccacgcactttagaatgcgcaggagacgataaggctattcatctttttttaaaacttatacgagcagagaacgtccgccgtcaataatgatggtctggccgcggatcatgtccgcttttgaagaaactaaaaactccaccgtatcgatcatatctttaatttcgaccattctgccggccggcgtattttggcgggcatcttccagcagttcatctctgttagggaaatgcttcagcgcgtccgtatcaatcgctccgcctgacaccgcgtttacgatgatatttttcggagacagctcaaccgccagataacgggttaacgattctaaagcggcttttgagacacctaccgtcgtatagttttcaagatagcggatgctgccgagcgagctgatgctgacgatgtggccgcctccgtttttctccatcatctttgctgcttcctgggcgcagaaaagcaatgctttagcattgatattcatcgtccagtcccagtgtgtttcttcgagttccatgaccggtctcagcacgcctgaagccgcattattgacgaacacgtccagtctgccgaatgtttcgtcaatctggcggaacatgtctttgatttttgccggctggccgacattggctttaatgacgagcgttttcacgccgagtttttcaatttcttcggcggtttctaatgccgcttttttactgcgggcgtaattgatgacgatgttgtatcctttttccgcgagtctgatggccgctgctttcccgacgccgcggctgcttcccgtgatcagtgcgcatttattttgttccatttttcctcagctccttgctgtgtatagttcttttcattcaacaaacaataaaagcaatatgtgttgaaaggggtcttttatatgtatgtcggacgtgatatgggcgaattggccatgatgcccaaaaaagattggagagattcagagctcgcttatttccatcatgccttccagcaaattatgccgtatttaaacgaagaaggccagtccaaataccgggaactgattcaggaaatcgaagcccgcggcggactgaaacggaatgaagcggattacggccacggcactcgcgtcagctatgactgacgctttttacaggcggccgctttcttccgccattttccatatcttttgatgggaaacgggaaatgcgtattccttgagctcctcttttgtgacccgtatgaattccgttgtatccgacacttgttttactttaccgaaaaagaccgaaatattccagacgagatgggtgaaaacatgttctacgatgccttccagctccccgatttcagcggttgttcccatctctttttctaaataggcttcaagctgctctctttcggttttgattcctttctgggtttcggtattcggaaactcccacaagttggcgagcaagccttttggcggccgtttatgaatatagacatcgccttgatcgtctgtcagcacaacggctgccattgtttttattccgggctttttctttttgcttttaacgggcagctcccgctctgtcccttccgcaaatgccgagcagtgcttttgtacggggcaaagcaggcaggacggcgatttcggggtgcagatgatcgcgccgagctccattaaaccctgattgaattcagatggtttttcatgagaaatgaaagcggataccgcctgttcgaaaatggttctggttttaggttttgcgatatcgtcccatatggaaagaattctcgacatgacacgcatcacattgccgtctacggcgggaatcggtttgttgtatgcgatgctgagcacggcgccttttgtataagggccgacgcctttcagtccgccaaattccttttcctcggcagggacgactcccccgtatcgctcatgcacttcttttacggcgctttgcagatttcttacacgggagtaataacccagcccttcccaggctttgagcactttttcctcatcggcttcagcgagcgccgagacggtaggaaattgctcaacaaaccgccggaaataagggatgacggtatctacgcgcgtctgctgcagcatcacctctgacacccacacccgatacgggtcctgattttctctccacggcagaattctctgttctctttcgaaccatgtaattaagtcctcgcgaaatttgtctatatctttttgtttcattttttcttcaagtgcgttcatatcttctcctcagatgtttcgggttccgcttttcttgacaccgtattttggtgtaaacttagggcacgttacgataatatgttacattaaatagtgataaagaaaaagcggaaacatatgagaacggcggataaacgccatgattgggcaaacagaaaatggggaatatcttataatgcgaaatatgcgggcgactgattgttaacgcctgctaggaggtcaacaatggatactggcactcacgttgtcatgggtatcgcgcttggcggaatcgcaactcttgatcctgccgtcggcatgcacacccccatgtctcaggcagttatgatcgccgctcttgccggctctcaggcacctgatattgataccatattgaaactgaaaaataatgccgtttatattcgaaatcatagagggttcacgcactccattcccgccgttttattttggtccgttctgattccgggtattttgtttatgttttatccggaagcgaactttttgcacctgtggctgtggacgctcctcgctgtcgtgttgcatgtgtttgttgacatttttaacgcgtacggcacacaggccatccgcccgttttcgagaaaatggatcgctctcggtttaatcaatacctttgatccgtttattttcgtcagccatttggccgcgattgctgtgtggtatatcggaggtcatccgggcgtgacatttctgatgctttatatcatcctcgcaggatattacgccgtccggtttttgatgcagctgcggataaagcgaaggctgcgtgaaatgattgaagaggagattgaaaccatcattatttcgccgacgatgaaattcaggcagtggcgtatcgccgtgacgacggcgcatgccttttatgtcggcagaagccttgacggccatgtcgtgatattggatacattcaaccgcgtgcccgttccggaaaccgatgtgatgaaggccgcgaaacaggacgaaaatattgcagcctttctttcattttcccccgtttacaggtgggaggtcgatacctttaaagatcattatgaggtgcgctttattgatttgcgctaccggagcaaaggccactatccttttgtcgccatcgtccacctcagtcatgatttagagcttctctcttcttacacgggctggattttcagcgaggaaaaactgcagaaaaaattaaagctcggctctgtttaagagccgggctttttttgtcttctcacatatatagccgcaaacacgaggctgatcaccgatagagcggccgcgggtttaaaaaacggcgggtaatacgttaattgaatatcgttttttcctttttgcgctttaaatccgatgaaggaataatccgctttttcaatctgctcctgtctgccgtttatcttcagctcccagcctttttcatatggaatcggaagcatgatatacggcgcgcgggttttgttttcatacgagatatgaagcgtatttccgcgccagctgagatcggccggcggttcattttccgcttttcggtatgcgtttttcagcgtatcgtaccgttcttcgtaaagcgccagtctgtcaagctgatatgatcctttcggcagacggatttggatgttttttgttttcggcactctgacagtaagatcgttgacacctgttttgtaaatagattgattcgattttctcgttgtcgtgtaatcgttcacttttaatgtaaagccctggtccttcgctttattcttcaaataaaagctgacgtaataatcgccgccgtccatcttagcggcttgcggcgtaatgatcaggccgccgccgtcttcgtttaccgtcaggatgccgttatgataatcgccatgttcggccgctacctctgcatggcggatcatatttttcgcctcaggcgcttttttcgtgttgattgtgcttgattccgtgacgatcccgtcaagcattgcccattctctggcaagggcgggcgcttttttcaggccgccctcgttatatacgcgatcggctgtccgtacgaacggaagcatatattgattttgataaaccgcataatgggatgattccatgatttttttgaacccatacggcacgccggcctcgtttgttttttccgtcatataatattttccgtaaagcaggctgtataaattagccctgtttcctaatgtcgcatagcggctgacgctttctctgcccatgtcaatctggaggtcgttccagtaaaaggacagcagattacggttcagtatgcttgagtatacgctgaatccgttgaacccgtatatgatcggggtgttattgaaaacaccgttcatccaatctaaacgggcaaacggatcagggtctttttctttcagacgctgaatgagctccgattgctctttgcctttatagtcagcacccgtcataaatgtatgcgataccgtataaatcttcccgccttctgataaagcatatttttcatatgtattagccgtaagcacagctgtaagcaatatgacggcatagacggcgggcaccgcgcctttcagtcttgtctttgctgcaaagaaagcggctatgctcagcaccagaagaaggatgacgggcaggttggcgtgatcagaaatatccagactgtaccgcctcacctggctccaatagagcagaacgacgagtacggcggacatcagcatactcttcatgctgatgtctgaaagcttagaaagcccgactgaaaccgttccggcaatcgtgaagcacaggacgtattcaaacctgttctgcggagctgaaaaaccgttaaaggcacttgccgcgaacggactgaagtgaaacagaatatacagcagactgattcccgcaaacagccggaacaagcggtttttgtataaagaaaatgtaaatagaaagagcaaaaaagccgccggcaggatgataatccggcttgaaaataaaatgttgtcggaaaaatcaagccatgcaatatgctctgaatacggcggccgcagattatgaaggtatccgtatacgacaggaataaaggaaactgcgcttatgccgaacccgagaagacccgacagaataaatatcctgcattgagtgagccttttcgcctcattgccttcaagggggatcacccacctgaataagatataaatgccgatgaaaatcagattaatatacgcaaaataaaagttgttgatcaatgtcagcgcacaggcaaagataaaccacgccggctttttttccctgatgattttttccgcgcccaacacaagcagcggcagccacaccatactatcagtgaaaaagtcccaatatacctcatgccggaagtagataatcgagaccccgtacaacacggcgccggcaaaagcaggcaccgtccgtttgacgaaataacggaacacacacgccgccgtgaatatgataaaactctgcttggcaatgctgataaaaacggaggcctgcgcccagaacagcgcatcagcctcgcccgtcagctgaataagctgcaaaaagcggacagcggcggagataaacaggaatagaaaagaagtagagaaataatagccgagctgactgtacactcccccgcccagtccgaacgaatagctgtaaaacagcctgccgttcatatattgatcaaacagcagctttttgaagaccgccatttgggcgatcccgtctccagaccccgtcatatagcggcctgccgaccactcttttaagaaaaaaatatgagcggctgccgcagccagcacacaggctgccggcaagatccatttattttttttcatacaacgtccccagaccctgcgcacagcggcggctgtttaatggttccacttgcgcttttttgtataattcgtttcattttgttctccgtatgttatattcgcttctttaattaaatagtgcgggcgtttttttgtttcatagtaaatccggccgatgtattctccgatgatgccgagactcaaaagctggatgccccctaaaaacaacacggcggaaataatggtgaaatatccgggtacggacacgccgtgtgtcagaatctgaacaaaggtcgttacaatataaaccatcgacagaagcaatatcagaataccggtgaaaaagcataccctcaggggcttgttgttgaaggagacgacaccgtccattccgtagttgaacagattgctgaatgaccatttggacgtgccgttcttcctttcgacattttcataaaatacgattttctggtcaaacccaatccagcagaacagccctttcgagaaacggttcccttcactcagcttcaaaagggcatcaacagcctgccggctcagcaggcggaaatctccgaccccgtcacgcaggtccacttcgacggctttgttgataaatttataatacagggaagaaagcacggaacgcacggggctgtccccttttcggttgcgctgcgcgatgacttggtcatacccttcttcatagccttgaatgaagtctttcagcagatgggtcggatgctgcagatcggcgtccatcacgattaccgcttcgccctgcacgtgttcaaatcctgccaaaatggccgcttctttcccgaagttgcgggaaaaagatatgtatttgacgcgatggtttctggcggccagttctttaatctgctgaagggtgtcatccgcgcttccgtcattgatgtagaaaatttcatagtcataatgaatcgtctgaaactctttttttaaagattcatggatgagcttgacattgttcccttcattgtaagacggaataataattgagattaacctttgtttcatgaaggcaccttctttgtattattctttttttaggacggccttaaaggaattgtccgcaaaacttcagtaaggcttttcctttttttaatgacgtttaaaccctttttttgttacacgggcagaaaattttttctgcatatggtttatattttgtcatgtttttcggcagatatgagaaaaaaaaagaaaaagtctgtacgcgggacagactttattgctgaaggtattcatgaatcaaatggctgacgatgcgcggtttttcgtgaatgacccaatgtgaggcatcgtctataaagattaagtcgccgtttggaatcatccgttttgtttccttggcgagctttttgctcagcgcgcggtcattgacgccccatattaatcggtacggaacgggcatttttagcggaacggcagggcctaaaccgccggctctgatcgcccggtaccagttcagcatcgccgtgagcgctccttttctgccccatgcctgtttgtagctgtcgacatcttcccgtgaaaaaagcgccgggcgttcggataagccgatcgcgtgatccaatacgcggtaatcgtcttcagacaatctccattccggcttttccggaagctgaaagaacgcgatataagagcttttcttccactgcggcgggtagaacggtgtgaccttccgcataaccgcagggtgcgggatattgaccgtgatcaatttttctacgtattgcggccgcgtggatgccaaatgccaggccacggctcctccccaatcgtggccgatgacgacggctttgtcatctgtaaaatgcgtgatcagcccgataatatcgtctctgagcgtatcaatggtatagttttcaaggccctccggtttgtcactgagattatagccgcgctgatcaggcacgacaacatggtatccggcatccgccagcggtttgatctggctcttccaaccgtaccagaattccggaaacccgtgcagcagcaccgccaaaggaccgtctttcggaccggctgaagccgtgtgcagcgtcactccgtttgtttcgatcatgtgaaacgtaatgtcattcatcgattctcctccccgtttgtttcaatcttctttctgttaagacgatgatcagtacgctgatcgcaatcaacaatacggcctgaacgatcagggcgaacggctgagtcagccggataagcaggctgcccgcaaatccagctgccgccgaaataaggccgaacaaaatcatgaggagcgcactgaatcgattgccttctctccactgcgactcatccgccatagagcgcttcgtccgatatccgtacaggctgttgatcgacttcggcggaaaaaatgtgactaaaatgccggccgcagccatcagaaggccgccgattaccattatcatatccgtcactctccttttcatcttttacgaaaggaaaggcggaaggtttcagaaaaaaagcaggctcattcgcctgcctgaatctttattttcgagttaagtcggccgttttcacataacctgctttcccgccgtatgtgacgtacgcccatttacggtcaaaccctccgtcatggctgaacccccagccgagcacattgacggtttcacccgctttaacgaacccttttttgccggtttccaaagtcggcgtataaaaagcggtttgtttcgcggtcaccgccttcaccggctgcttcatcagaaaatgcgtggaaatataggctttgtgacctttgtagtcaatttcagcccaatctgctccttgaagccgtttaacctttacggaatcctctgaacgaagcgtgccgataatcgacccttgtttatttggttctttgcggacgttaagttctcctgctttcacgatatatgtatctgctgcggtgtctatttttgtctggtgaactgctgcggcattcgctgccggatcaaaaaaaacggtgcctgcggctaaaaataagcaaagtcctgcggccggaataaatgcggttaacccctttttcatgttcattgtggttcctccccgctattttataagttattacacatttccacattccgcgggtcgtcaaacatgattttcccatttcttttataaaaagaaaaaaccgccggacttgtatccggcgggcgcactgctatgttaatgcaggagacccctgctttgatccaaataatgagaaacgtcttcccgaacgctctggaacatatggagcttgctgccgtatgattcgatccattccttgacgacgcgttctgtcatttgctctccttgatacgggcggccggcttttgcgtaagtcgcttcgaaatctccccataaaagctcaacccaagttcgcgcttgcaaatagctgagcatgtcatttttctcaagcagcaaattcgtcagtttgtcgatatatgtattcatgtctctgtctcctttccttgggaaaacctgctgcttttacgcagcttgtcacaggcatatactaactttacgtcttcagtccagaaggcgcaaccttttgatattggccgagggggaaaacaaatggtccggaacaaggcaaaaggatttcctaatcagaacaataataagtttgaaggcgaaccgcgggcaaaggatgactacgcttctaaacgcgcggccggttcaattaattcgcacccgcaagagcgcatgagagcttcaggcagacgataacacacaccgtaagagaccgggaatgacccggtctcttttttgcggaaaaaaacatccttttgcggtcataacgctaaataaattccataatatgttaaatgttcaaccgaaagccggtagacaaaaaaggaggggttttataaaatgaagacagtttccaaacgattgctgagccttaccgcattcttactgtcagtttcattatttgctgtttcagctgaagcagcgggcagcccgcagacatctgtatcaaacagcggtgaggagtttgacacaaatcagaatcagcctgtacaaacaacacagacatcccccgcttatgaaggaacgggcctcaccaaaagacagcttgcacaaaacagcaaagctgacatcaagtcattaaagccttccagtattattggaacagacgaacgaatcagaatttctcctacaacatcatttccatatcgcgcaacagcacagctgaccgtcacatacagcggcagcacaagcacctacggatgcaccggtttttttgtcaatgccgacacgatcgttacggcgggacattgcgtgtatgatcagaaaaacggctgggcatcgaaaattacggcagctcccggccgcaacgggtcatcgtacccgtacggctcttattcaggaaagacattctacagtgtcaaaggatggacagaaaacggtgacacaaactacgactacggcgcaatcaaagtaaacgggtcgcccgggaatactgtcggctggtacggctaccggacgaccaacagttccagtccggccgggctttcctcaaccgtgacaggatatccgtgcgacaaagtgtccggttccatgtggtcggacagcaagccgatacgttctgccgagacatataaactcacctacacgacagatacgttcggctgccagagcggatcgcccgtttaccgcaattacagcgacaccggccagaccgccattgccattcatacaaacggcgggtcgtcttacaatctgggaacaagggtgacaaacagtgtattcgacaacattcaatattggtcaaatcaataaagcttttgttttctttctcgccgcagccgttttatgcggatgcggcaaagcggatgattccgccgccaaaaaagcattgcccgttacgctccatgttgaggatgcagacggttcaccggcggccggtgtgacggtcaccgtgatgaaagcggcggagtcagattatcagccgaatatagaccgcggagagataataggcaagactgatcaccacggcgagattgcatggaaaagcggcgcaaaaggaacctatgccgtcatttttgaaaaagacggtataccggaaaccaggagtatttccttagctgagagtgataaacatacggtgatcagcattacattgaaatactgaaaaaagcttgcaggcggaatatcccctgcaagctttttgttatcctttatgcacttggtattcataaacatctttcttctcagacagatgagcgaacgtggaaagcacaaggccgagagctgtcatcagcgcaccgccggcaaacagccatgagtaagatcccgttcccccgagaatcaatccgccgatccaggcgccgagcgcgtttgccaggttaaaggcggaaacgctcaccgcagcggcgattgtcgtgccgttttcagaggaagaaataaccttggtctgcaaaagcggcggcgtgccgaacgcacatgcgccgaataaaaatgtcgctgaaaccgcggcggctggaaaaacggcgatataaggaaaaatcgccaagacgccgatcaagccgatcatcacaccgatcatcgtgcgtgtcagcagtttgagcggcactttccccgcgaagaaattccccgccactccgccgagaccgtaggcaaataatgcgcctgtaatgccgactgtgccgaaccccgctgaatctcttaaaatcggctcaataaacgtgtaagcgataaatacgcctgagtagccgagaatagtgatcgcaaaggaaaaaatcacttgtttatgcttaaagacactccattcattcatcagcatcggaatcactttcggtttccggttcggtacgatcagcatcagtccgatcagcccgatcatgcctaaaacggaaataatgaaaaagacggcccgccagttaagggcatcccctaaataagagccgaacgggacgccgagcatcagcgccacggttaatccgccgttcatggaagccgcggcggcggaacgtttttcaggcggcaccatttcactcgcaaacaccatggcgatcgcaaaaaaagctccgtggatggatgcggataaaattctggaaatcgccagcacggcgaagttcggcgcaaagacgctcatcaggttggcaaggacgaagatgcccatcagccctagcagcaccggctttctcggcagcttaaccgcgataatggttacgatcgggcccgtcaggcagacgcttgccgcgtacgccgtaacaagcatgcccgctgaagatacatgtatatgaaagtcatcggcaatcgacgtcagaatacccatgacagcatattccgtatacccgatggaaaatgtgcagatcattaaaacaaaaatcattaatttcacagatggctgtttcattttgatattcaacgcaaatcgcctcctttttatttaaaaaacaacgaagtccatcttaaaagatatcaaaaatgaattcaatcattttttactgaaaggttgaaacgaatgtgctcgaaaagaaaaagaggccggaaccggcctcttttgttattttttttcttttaaaacggaaatcggcagtgcttcttccccgtcagacggggaagatctgtgtccccaggcgaatacgccgttgatgtaatcaatgcggaaagtgtcatcagaaccttctatctgatacaccccgccgggccgaaagtcttccgggttcagcatgtaagctttggccatcgtaattttccgttcaagcacggccagttcatttacaatgcccatctgttccgcttttcgcgctttttccgtcagtcccgcaatttctgtctgtagttcatgaggcgtcatttgactgtatcgtttgtccatttcagtttactcctcttcctgcaagaattgatcaatatcgtcaatcgagaatccttttctgaataagtactgtttgaccttcattccgctttcataactgccgtcataacggtatttcctgatcgctttttccgcatgagccttcagagcttccatctcggcttcatcatcattttcatactccgtttgctccagagcggcattgatgacgtcgaaagggaaaccttttcgctgaagctgcatctgcgcccgctgtctgatctcttttgtggacagctttttgtcctttttcaggattttgccgatatgtttcagcgcttcttgtatctgctcatcaaatgtaaacgcgctgagcgtctccttgatggtatcgtcgtctattcctttcgctttcagctcgcggaacaggacgtcagggcctttgccgtttgtttttttgtgggtgctcgcataggcttcggcaaattctttgtcatttaagtagcggtaatcgtacagtttatggatgacttcagaaatgaccatgtccggtgtttcttttttcttcagatgatcccggacttctttttcagagcgcatccggtatgataaaaattctacggcgcggttaaaggcttttttcacgtcatcgccgtactggatttcaagaatgtcaagctcgtccagttctttcccttttttcaggtcataacgcacaagcacgtcggcgtcgacgctgaatgcatatttctcatcaagaaagatgttgaagcgctcggtatttttcttttgggtcgatatttttgtaataaacggcatcccggtctcctttcccgccccgatgttcaggcgtttttctttttggcaaatgaggtacagtatatgtatcaacgtgtaaggagagatggatatgaatatcgcgatgacaggcggcactggttttctgggccggcatctgacaggtgtgtttacccgccggggacatcatgtctatattttatcaagaaaacagagagaaaccgaacaaaaaaatgtgacatatgttcaatggctggccgaaaacgcggcgcctgagcgcgagcttcctcctattgatgtatgggtgaacctcgccggcaaatccatctttgaccgctggacggacacaacgaaggaacaaatcatctcaagccgggtagaagcgacgagagaagtcagacggattatgaagcagcagccgaaaaaaccccgggctttgattcaggcaagcgccgtcggcatttacggcacaagcacagaaaaaacgttcaccgaacagtcagatacgtcaaatgaagattttctcagtcatacggctcatatgtgggaacgtgaaggccagaaaattgaagcgctcggcatccggacggtatatgccagattcggggtgatgctcggtgaaaaaggcgccctgccgctcatggttctcccttataagctgttagccggcggcaccatcggctctggacggcaatggctgtcatgggttcatgtggatgacgccgcggaactcatcgcttatgcggcggagcatgatgacttgtccggtcccatgaatgtgacatcaccgaaccccgtagaaatgaagcaattcggaaagacgatcgcaggcgtcctgcaccgcccccattggattcccgtaccggaactttttctggagaaggccttgggagaaatgagcctgctgatcgtaaaaggccagcgcgccctgcctaagcaggcgctgacatccggttttcaatttacgtatgaagaacttgatttggctttaaaggatctcttatctgcataaaaacggaaataaaagccaatcctattggtattctgttttgaaggagggtcttcttttatggaaaagaagcgcgaaaaacatcagcagggagccaatctgaaaaaaatgcaggaagtcctttattccggtgaattcaaaaaagcggaaagagcagccaaacggaaataaactgaataaagatcgggaccgggcagatactatgtttgtttgatatcacttttttcagggggcgattgatatgggcagaaatcatactcacaaaaaccgtgataaaaacaaacaaaaacttcctcaagttccggatgctttgaaacgcgaaacagacggcacatatgaggaatattcaagcgagcttgctgattccgctgaccgtgaagcgcaggcgcggatgaaagccgctgacaacagagcaaaaagcaaaacccgctaatacgaaatccccgcctctgtatagagacggggatttttttacagttcggtaaacaggttttttgccggcgtccgttctttcgccttaggctgttcgtccggatagcccgtttggatgatggcggcaaagcgctcattgtcagcaagaccgaagtcttggtgcacctgtttgtcatacatgatgcggccgcttttccagaccatgccgatgccgtttgaatgcgcgagaagctgaaggttttgaatcatgccgctcagcgccgcgaaatcatcgtttctcgtaaattcattttcatcttcttttaagacgaccagtaaaaatcccggaacggcgctgaggttttttctcatgttccgctctttttcctcgttgaaatcatcttttatctttttgaaaaaagagacgtagctgtccgcaagctttgcttttcccgcttcgcttgctgcgtagataaaacgccatggctccgtcagtctgtggttcggtgcgtaaacggccgtttcaagcatctctaatatgacttcagaaggtacggtttccggtttaaacgaccggatggatcttctgtttctgattgcatgtgcaagactttcgttttgctgtaattgttcggttttcggcatgccgattcaccttcctatccaaatgaaaatgattatcatttataatataacggatacgaccggcttttgtaaaccgttacggaagctgaaaattgattgtttcggcatacacggccgttcccgtcatcttgatgttcatcttttcgttatcttctgtaatcctgatttccacttttccgtctttcccgatttcctggccttgttcaatcgtgaggcattcggcttcagatcctccgtattgccgcatataggccgccatgacgcctgaagcggttcccgtgacgggatcttcggtcgtaccggagaaaggggaagaaaaatggcgtccgtgcagatcactttccgaatgaacggtttccaaagaaaagggatgaacgctcgctttcggaagatcgcgcaaaacagcggggaattgtgcgttgtccggcaccatattccgtgatgctttaagtgatctcagcggaacaatcagtgtccagatccccgttgatccgtagacaatcggcagctcgctgtgaaaatcctcagccgtaatcccgagcgaggcggcaagcttttctttgtcgcccgtaaacggcaaaaattgcggaggagcctgttcgagtgtgatgtatacccggccgtttcgttcagcggcttttgcgggaagaatgccggcttttgtttcaatttgatatgtctgatcagcctgaagccttcccttttcaattaatgcgtaaagagaggcgacggtagcatgtccgcataaattcatttcgtggccgggtgtaaaatagcggatgcgcagatcagcttctccgcttttacagagaaatgaggtttcattgtaccctgccatttcggcgatcatctgcatctcttcatctgaataatcatctccgttaaagacgattcccgcgggatttcccaaatccggaatatcggaaaacgcttcatatttaaacacggttgcctgtttcattcatcagccttcctttcaccttatgatcatgttattcagtataacagagtgaaattagaatttttagtcaattatttttaaaaaaagacgccttttaacggcgtctttttttggtttttccgatcaggcgggtgacgaggatcatcgtgacggacagcgatctgtttttgcggtatgccaagtatttcccgcgccactcaggtttgtatttttctttaaaggcccgcagcccgctgaagctgtacatataccggacgttgttgaagatgacggccgcgattctttccgaccagaaagatgtaaaagccgtacctacgtttgacaaaggcgccatgcccatattgaaggtggtatagcctttttcctgcgcccagagaaacagacggatgaaaagcgcgtccataataccgttcggcgcgcttttccgataacgcatcaagtcgactgatatctcgccttcctgatacatcggcatcaagttggcaaaagcgatgatctccccttccgcgtctttcacgtaagcaatcggcgcctgttccagataatcccggtcgaagaaaccgagggaaaaacctttctcttttttcggtccgagccattcgtccgaaatgtctttcagcttggcgataaactcggaggaaaacggcggttccccgacatgaaatgtgtagccttcgcggtcaaatttgttgttaatcgcccgcagccccgcttttttcttacctgagagcgtaaaggcctccatatccacgaatgcttcttctccaagcttgaagaagttatagccgaagtcatggtacagcgccagatcttcacgttcgatctgataaaacatgacactcagcccctgcttatgcgcttcattcagaaattcctcaatcacaagcggaaaagagtctctctgtcctgacggatcaccgagcacgacaagccttctggaaatctggctgaacaataaaagcgctttgccgtcgcttgagaaataaaaccgcttatccccgagaaagccgagatggctgagcgcatttccgccttcttccgccaaaaaggacttcagccgttcaggatcggcctcttctccgatcggcttcgatcttttatgataaaagaccgtaaacaaaaggaaaaacagcggcacaacaataatggccgtcatcgtggcatatgtaatgtgcgaattgttatggacgaaatagtcgtggcgcaggagccgattcattttatcccaaataaagccggcaatgagattgtagttaaacaaggcgataataaacagagcggccgcaaaaatcatctggccgagcgtatacgatgcctgctctctgataaactgccgctttaacagcacaagcaatacgatgacgacaggcagaataaagatcgcgctgatgttcattccttttaagaaactgaacacaaaaccgccgaccagcgcggcaaccgccattgaataagaacgtttcgtccgtttgtataattcaatcggcaaaattaatagaatcaaagccgcgcttagcgataacgcgttaaacgcaaggagcgccgggcgcggaatgtgcggaatgaccgtctccctgtcgatcggcagggcgacagacgcaagcacaacgactcccgacacgaaaaccaaaagcgacagcgaaccgtaaagcaccctgattaagatggcgcgctggaatacgagaagcacgttcgtcgtttccacggcaggcgccatcttcggatttgattccagccgtttaagcgtattttccgttaagtcgccggccgcaaagaacagcccgaacacaaacggaataaatgaatacacaatccggtagatgacgatggatgtcacaaccgcctcctggggaaagcccatattctgcatgccgagcagaaacagaaggtcaaacgaaccgaatcctcccggcacaaggctgatgattcccccgatagcggcaatggcaaataccccgaatacatggcggacatccgcgtgaatccccatgacatacagggaataatacatgacgacggccgccgcaaaccactcggcaaacgatgccccgatgtaagaaaaaaccggatgcctcggttttgcttcaccgtcttctgcgccagcttttttattgttgattccagcggcgattaaggctgccggcacaataagcgccactccggcaataacagcccacatccacggtttctcacctgtaatctctccaaccggcagaacccgggcgatggtcaggatactgaagacggacagcccgagcagcgctgaggacgtaagccaggcgatgcctgcgacgaggcgttttacgtcattcgtatgttctttgtaaagcatcgtccgcagcccgacgcccgccagaccgccgaatccaaggacattgttaaaggaattggcgataaaggagaccctgaatactttccaattcggaatgttgaggcgaagcgtccgtttcagcacaaagtcataaaaggacatcgcgctgacggcaagaaagccgagcagaacgagaataaataaatcgtaacgctcaatcccgttaataatgtacagcgttcgtttaaaagaaaggtctgtcaattcctttttggactgataaatgactaaaagcaaaactgcaataggaaataatacttttaatatcgataaggcattctttttagtcagcaatgttctctccaatcatcataaaatagcttatttattataattcccccaataatctccaacatattatacactaccacctcacattcaaacaaaactcgtctgcaactttctttctctgattaaaatcagtaatatggtatgcaggagtatgaatgaggaagtgagacgatggattataatctgcatgatacaacggtattaggcggcgatattttttctcctgaggaacgggatatttgggtgctgtacatgaaagtgatgacatcggcgggactcggcgatgtgtcggagtggatgaagcttgatatgagcatgccgcaaatgaaggtgctgatgcttctgaacaaccacgggacgcttaaggtaagtgacatagcggagaaaatgggcgcttccctttcaaatacgacggggctccttgaccgtttagaaaaatcatgtttcattacacgcgctccgtcagaagaagaccgccgttcagtcgtcgttcaattaacggaaaacgcgaaagatattttccgcagcctttatcaaaaaggacatgtaaaattgaagcgttctttggaaacgctgaccgctgaagaaaaacaaacggtcaatcaagggcttgccattttggcaagagcgcttgattcttccaaacagggatagagatgaaaaaggcctgccggtatcggcggcctttttttgtttgacatttaattcacttaaagtgaataatatattcgaagtgaattaaaaacgaaaggattgatcagtatgccggagccattgcaaacagaaaaaaaccagagctgggccatcactctctttacgatcggtgtgttcatggcggcgctggacaacggaattatttccgctgctctgacgacgattaacagctcttttgatgtttctccttcatggggatcgtggggagtgaccctttacacattgggactcagtgtcagtgtgccgattgtcggcaagctgtcggaccgatacgggcggaaaaagctgtttatgattgaagtcgggctgttcggactcggctctttgcttgtcgcactcagtcagagcttcccgatgtttttggcggcacggctcattcaggcccttggcggcggcggaatttttattatcgggagttcgcatgtgctggccgtgcttccgaaggagaaacaggggaaagctctcgggcttttaggggcgatgaacggtatggcggccgtcctcggaccgaatatcgggagctttttgcttgatgtaaccgggtcgtggcattggctgttcttgattaatctgccgattgccgccgctttggttgtgtgcggcggtttgtttatcgctgaaacgaaagagcctgaggcgaaacggcttgacctcgccggcacaatgctgctgtctcttgcgatcttatcttgcatgatcggtatcacgaatctcgatggggcgaagctgtcagaaagcataatgaacgtaaaggtgtacgggtatcttttgggagcggcacttctctttctggtgctgcttaaagtcgaaaagcgggttgaaaaccgagggggcgatccgattctcgcctactcgctgctgcaaaataaagtgtttcaatggacgctcgtcatcggatttttatcgggagggctgctcgctgcggtcatttttattccttcttatgcggagcaatatttgcacgtctcggcggagaaagcgggttattggatgacgccgctcgcgttggcgtcaggaatcggagcgtggctcggcggggcgatcacggataaaaaagggccggtcttctccgcggttgtatcaggcgccatcgcatttgcaggcttcagcctgtttccgttatgggtgacggataaatgggaatttgtcacagcgagtgtcattgcggggatcggtttcggatttctgctcggggctccgctgaatgtgcttgtatcagaaacggcgggccaaaacaaaggcacagcgctcggcacgctgtcactcgtaaggcaggtcgggctgacgcttgctccggctttatatgccggcttcattacagcgggctttgaccggatcggagatgacatcaaaaaccgtttagcgaaaagcggcattcccgctgatcaggcgcaaatgcacgatatcggcggcggactttcttcgttgcaggagcaagtgagccgaatccccgttcccgccgtcaaaaaagcggtttctgatgcaattgaagcgggcatttccagcggctaccaccatctttatacggcggccgccgtcatttcattatgcacgattgtgtctgcggcggttttggcgtttttccgaaagccggcatcctctaagacagatgccagcccatccgccgggaaagctcagtaatatgggcgatgtgatgttcagagtgccagacatatagcccgagcgcttgttccagcgtaaccgtctctttagatacaggatggaagtatgtccgtttgaattgggcttccgtcatggagcgcaaaagagcggcccatcttctgtgcaggatcgttaacagctcaagcgcatccccgcaagcggcggttttggaatcatgaagatcggcccagcctttttcatcataaggacggatttttggttcattctccgttaagctcaatttaaaccgagtatagccgttcatgtggctgtccgccagatggtgaaccacttggcggacagtccatcccccttcgcggtacggcgtatcaagctgactgtccgacatcgctctgacagcttgtttcagtttggccggagcgtgttccagcgcattgatccattcttgtttctgtccggccgaaatcgattcagccggctgatactctccaatcggatagctgagggtttgtttttccatttttgtctctcccgttgatcgtattatgaaagtatgatggtgatgtcgcagccttccgctttcgcttcacgaaagacctgaagcacactctcggcgccattttctgtaagctgcttgctttgttcaaactgtctccattctaaaacgagggggtattccacccagccggtcagacaatcccataaagcgtcaaggttttcaccgtagtattcaggaagggcaagttcctttttcaatgtctgatgcaggtcgctcatacttctgatttgctccccgttaataactgctttattcatgcgcggctcctttctcatgattttattctatcagtttaccattttcctcttcagaagtggccggagtctgccgcggttccagctggacgatgccttgcccgccgtcaacggccaccctgtctcccgttttcagttttgacgttgcatttccgcacccgacaacggcaggaatccccagttcccgggcaacgatcgccgcgtgggacaaaggggcgccgacatccgttatgatggcagccgctcttggaaaaagcggggtccagcctacattggttgtcgacgtcactaaaatttcccccgccgcaaaagaatccccgtcttccggagcatcaaggacacggacaatgccctccactctcccggccgctcccgcgaaaccttttaaagtatgcgcatcatcagtttccgcaggcataaaagcatcgtaataatccgctcttctgtcaggatcctcagcccatttaaacggattgaaccttccgttaataacggatgggaacggcggcagttttttataggtttcatagttttgctttctcgcttgaatcaacgcaaccgccggctctttccctgcgagcagatcggttatttcatgcagatacaggaagaaaatatcgtccttcatgccggtcatttccgccgctctgagcgcgaatgctctggctgtccggtacaccctgacaaattcggatctggttgtttctctaatattcgcgtattctgacgctttttccattttggctttgagccatttgaccttatgaggatacttttcttcaaatcttcggaaggcctgttcatgcgcccgctgctgtttcaaaagcagttgttcggcatcaatacccgactccttgtgttctttgatctgcttcgtcagccaatcccgattttctcccggatgcggtatggaaagttcgtattcatgcgggccacggtggccttggttcctgaggtattcttcctcgctcatacggcctttcatgacttgatcaatgccgataatcggctccaggctggccagtccgccttttcccctcagattggagagcaggagattcgcatcttctattcctgcgagttttgttaattgagaggttaacgacgaagaggattgcgcagaatcacgcccgccggatattaatgcaaaccacgcgttgcataaatacggatagatctcattgttccatatcgctaataatgcccgctccgtttcggcacgtttcagcttttcctcaatattccggcaccactccggcgattcgtccaagtaggaggacatgttttttttcgcttgcttcattttcgacagatacggtttcagttttttcgggatgatcttcaaaagttcatactttgagaacggatataaaggaatcttcatttccgccgggatttctcccaatgtatcgctcatcatttttcctatttttccgcctttcggattcagaccgaaagcggcgagaacggaaagaggctggctcatattgttataggctctgccgcaaatattgccggaccagacataatagcccggaataatgcccgactcttcatccagattccggaggagcgaccatgtcagcggcgtcatcacatcgggaatcgcttctcctatattggtgtttgtccataaaaaatcaccgctgaaagaatcattccattcataggtttccagatttccggcttgtaaggtcgtaatcgggcgggattgaagaatatacaatgtcccgtccgcggcagcccattcaatatcctgcggccctccaagatctttttccagctttttcgccagtttatagagctttgacgcatatttgcgaaattccccggggccgtcatattttttcttaggccgtgccagtttaaaagaataggcatcggcttccccggaaacgagctgctccccgagaccgtagacgtaattgcctgtcatctcccgcctgctccccgtaatcggatctgcggtaaacagcactccggatatctcagacggtatcatcagctggatgacgattgcgatttcatgctcatcttccattccctgaacggcgctgtacgcttttactctttctgactgtgtcgatcggcggacttcatcaatcgccctgaacatgtcttgatctgttttgacattcaacaccgtatcgaattctccggcaaaggaagcctgagcggaatcctcgctcagcgcggatgagcgtacggcaaacaacgcagatgcatggcggctgcggatggaattcacatattgatcaacagcctctctcgcctgatggcggaactgtccgtcctgaaaggcagacggcaaaatcacaaacccttcaggcacaggatacccgctttgatacattttagagagaatgcttccttttcctcccgcaaaggaataaagttcggccggaagttctccgaatgttttgacacagtcattcataatgtccccgctcctttttagtcgttcatccaagctcacagtttttctctttttcactttttttgaaagtatttcctataagtatacattatatcggtcttcacaagggagaaaatcgatggcgttattttgtcataaatgcatccgtcaaaacggccgcaggcgggggctttgtttgcaggatgtacaactatccgtcctcgtgccggataaggcggacccgtatcaaaaaggcggccgaaacgccgcctttttttcagactgtgcggccttgatgcgccgccgtatttcttttggtctgcttcggctgatacactttcccgacaaacaggtatccgtatctgaaatggttgcacacccaagatacgaaaatgggaccgagcgtgcagatcaaaaataaaagaaggatggcagccggcaaaggcattgaccgcaaatagccttccagaagatatccgctgattaaaaagtaggaatgcagcagatagattgaaaacgaatagttgctgatcatcatcacaatcgcgggcacttttttgagctttgaaaacagatgaaaacacagaaagatcatactgaccgcgtagatcataatatccggacgcttagaggaaatggagccgccgctgatatatgaaacggccactatcaatattgccgatacggccgcactgaggtaaaccgcataacggtactgattgatgagcgctaaaaaacgcggatattcctttccgcaataaaatgccagacagaaataaaacacccagcccggaaacggaacccaaaagaacggaaaaatagaatcaagccccgatgatgccggcggatgaacgatggaaaagtaagccagatagacggcattgatgataaacgaaacagacagcacccacacgggagatgtgttgttcagccagcggtgcagcagcatatggagaatgtaaaattgaaagatcacaagaatgaagtagccgatgaagtttcctaaaaacacattttctaaaaatttaccgatcactgaaacgaatccgactccttcttccgccacgcttttcattaaaatggcatccaccgcggcaataaacagaaacggcacgaaaatgactttgccccttttctttaaaaaacccgcgggaacgcctcccgggtatgacctggcaagcagaaattccgaaataaagataaacgccggcgtgctgaacatcaacagggtccgaaaagcatcaaccgtatgggcggcactggctaaggactcttcctgaatcatcagcaccattgaaactgcatgaagcagaaccacacttaaacaggacaggcagcgaatcacgaaaatttcttttatctgcatgcggccgctcctttttcacaagcgcgccggactttggcgtatgcttggcgcagccatttttcccgcagctcgggtgtgctcgttttgacgacagaaaaaaggttccgctcggctttttgaatgccgcaaaattgcagaatgccttttttcagcgtaatccagtccgagtttttccggaaccactttaagtaccagcccggggaatccgccgtataaaagacctgtgccgtctctgcccggagcagtccttttacgcggccgttttcatatgtgtaggcttctccggcgacaagcactctgtcaaaaaagcctttcataatcgccggaacgcctccccaccacagcgggtagatgaaaatgagatgatccgcttctttcatcagtttccggtatttcttcgtttcagcgtcccggttcatgtcagagcgctttttttcgccgccgtacttcagcacgggatcaaattggtcggcgtataagtcaatgaccgtatagcttcggccgctgtcctttaaagccatgacgacgtattttacgagagccgcattgaaactgttctcatccgggtttgcatacacaatcaccgtcttcatatgtccctcccagtatttcttaatttttacaatgattatatcatgatgtcatatgaatgaggcaaagacatgagaaaggctttttccagttccgctgccgtttcaataacctctttctgcatattttcactgattttgccgccgcagattcaatttcaagcatccggcacttctgcgtttttgagcggccgtatggtatactagctgtcaaatgaatgggcttggaggacaacatgagaattttaaagtacgcgattttagggcttttgcgaaaaggcgaattgagcggatatgatatatcgagctattttaaggaagagctcggccagttttggagcgcaaagcacagccagatttatccggaattaaaaaaactgacggctgagggatttattacgtttcgcactgcgattcaaggaacaaagcttgagaaaaaaatgtacacgctgactgacaagggagagctggagcttgctgcctggctgacgaaaaaagacccgattccggaaacggtgaaggatgaatttatgctgaaggcttatttcatctcagcgttgacgcaggaagaagcggatgagctattcaccgatcagctcgtaaagcggcaggagaaattgtccgatctggaaaacagttatcaagaactgatgacatcgtccgcggaggcggattcattttcttctcctgatttcggccattatctcgtgctgacaaaagcgcttgagcgggaacggaattatatttcctggcttgaagatattttggctctcatcaaaaaagcataaacaaaacggggcggctctgtatctgcaagccgcctgtttacgttctgagaaccgcattgataaacgaatcagccattaaaataagaaaaagcagactgaaatacacaatcgaataaaaaaacatccccttcgaccattgcgtgtcatccgccgcctgaaagcctttgacgctccggtacagccagatggccccgagcaggagagcggacgcggtataaaacgggctgacgtctatatatagaggaacgagcagcgaaaccgcagtcagaacggcaatatagcgcagcatttttatttttgtgacgcgattgccttttataatcggcaaaagcggaatgccggcggcacgatactcttcctttcgcctgattccgatcgcccagaaatgcggcggctgccacaaaaacataatcgcgtataacaaaatcgcgggcatatcaatgtacccggtcagcgcgcaataaccgattaaaggcggagccgcccccggaaagctgccgacaaatgtgctccagacggattgtcttttaaaccaaagcgtataaacgacggcatacagcaaaaatgcaagcaggccaagaacggcggtcagtacattaagcgaagcaagcatgatgaatccgcatgcgccgagacatgtgccgtacaggatcatgaccggcggcggtattctccccgtgacgcttgctcgggtgcgggttcgcgccatctttgcgtccatgccgcggtcaaagaagttattaaaaacagtgcttgatgccatgactaacgccgttccgatcatagcaaccgccatggcggcaaatataccgggccctccgcccgtcctttccgactgaagccatgcgatccaaaatccgcccaatgcggcgagtgaatttgagatgataatccccggcttggctagaatgataaagtccttgaccgtcacccggtttccgttatgcttcatcggctgttccgtctgtgctgcatttgaattcatttgttcaggttctcctttttcggcttatcatatcaggaagaatcaggaagaacaatttattttggacatttttcacataattgtaaattgtatatgaaaagccgcatcttgtgaccggatgcggcttttgcctttttctattcaaattctgcccatacaacaccctgatccgccgaacggacacaattttcaatccagcggatgccctgagctcgggccggcgatggcgggctctacgcgtcatttttgcgcctcactgagatgttcgctctcttcagtcacagacgttctttcccgagccttttcaagaaaacttcagaaaaataacaaaccttgccgattagacggcaaggtttgtttcttacagtgtaaatgcgatatccgctcctgatacagggtctttgacgaatacgccctcttctttttcttcaatctcaaagccggcatcggtcagcgcttttgtcacacgtgacagctctttttgatgcgggagcacgatggtgtaataatccagcccgcttgcgtttcccggtttcggcggcgcatgttttccggcccatatattcagaccgatgtgatggtgataccctcccgccgaaacaaacagagcagacatgcccgcgtaattgccgacaatgtcaaaaccaagaatatcggtgtaaaacgctttggcttcctgtaagtccgtcacatgaagatggatgtggccgataacagttccttctgggagacggcttttccgttcagctccggcttcttccaaaagcccgtccacatcgacgggcgccgtttgcataacataattgccctctgcatcccggcgccacgtgctgcggggacgatcggcgtatatttcaatgccgttgccgtccggatcagacaggtaaagagcctcactgaccgcgtgatccccctgaccgagcgcgatgccgttttcaatcagcctggccaatgcgataccgagttctttccggtcaggcagaagtatcgcgaaatggtaaaggccggtgacagaccgctccggcagaacgacggcgcctggattttcttcaagcaccagcaggacgcgttttccgtctgctgacagtcttgctgaacgatctgtctgcgagatgacttgaaggccgattacattccggtaaaagccgagcgagcgttccatatttttaatggtcaatttgacatagccgattgccgtatcttgatgaataccggtcatttgaacgccttctttcttatgctgaaaaagtttctcccttttttgatttgaaaaggagctgatccaatgaaagcagacggcttcctgaaagcgctaagtgaattgacgcaaccagtaagatgaaatcaaattccgatccgcccataaatggggaggaaagcttcgccgtgaagatggcgccgactaatgtgacggcaaacagaacgccgataatgcgcgttgccaaaccgaaaaagatcagaaccccgccgacaagctcaatcgtcgcgatgacatagaccataaaggccggaatcccgatgctctggaaaaattgcgtagttccttccaacccttgaaacttggataaaccgtgaacaaaaaagataatacctgttacaacccttaaaagcagtgttcctgtttcgaatgatttattcataaaatcctccttgaaaattattatcacttactttatgtaagctagtatatatacataacttatttacgtcaagtaattttgttacatttaacgaaaataacttaaaagtactatttgccttcgcaaaaaaagacctccgcactctgtcggaggtctttttccctatctatgattcccggaactggctttcatataattcccggtaaaacccgttctgcctgagaagttcggcatgggttcctttttcagccatttcgccgtctttcagcacaagaatctgatcggctttttgaatcgtgttcagcctgtgagcgatgatgacgcttgttctgcccgccattaaacggccgagcgcttcttgtattttcacttccgtcaccgtatcaatgttgctcgtcgcttcatccaagatgagcagcaccgggtccgccagcacagctctcgcgatggaaataagctgtttttgtccttggctgatgcccgcgccgttttgggtaaggacggtatcgtagcctttcgggagccgttcgatgaatccgtgggcattggcggcttttgcggctgcctccacctcttgatcagatgcgtccagacggccgtaacggatattttccctgatggtgccctgaaagagaaaggaatcctgcaggacaaaccccatgttttttctcagactggatctcgtcagttttttgatgtccgttccgtcgatgaggatgttcccgttattcggctcgtaaaagcgggcgatcagactggtgacggttgttttacccgctccggtcggtccgacgaaggcgattgattgtcctttcggaacgctgaaggacaggtgttttaagatcgggctgtcttcctgatagccgaaggagacatctcggaattcaatctctcccgttttgatcggctggtacagcgcatgctcttcatcttcccgctcctctttttcatccagcacgtcaaacacccgctcagccccggcgatggccgataacatcgtattgaactgattggctaaatcatttaaagggcgcgtgaactgccgcgagtattcggcgaatacgacgatagacccgattgagatccatcccttcagcgcaaacagcccgccgaccgccgctataatcgtaaagcttaaattgtttaaagagttcatgactttcggaatgaatcctgaaattgtctgcgcccaaaaccccgatgattgtaacgccgcgtttttttctaaaaattgttccatgacgcggtcttccctcgaataggctttaatgaccttcgcccctgatatcgactcttcaataaaaccgttcagctcgccgagatttttctgctgctgtttaaacagcagtcccgtccggttggtgatccatttaatgctcaaaagcatgatcggaataatcaaaagcgtgatcaatgttaaaagcggactcatgtacagcatgacggagattgtgccgacgaatgtaatgacgctcgacagcacttgaatgacggatgtatttaaagtggagctgacattttcgatatcattggtgacccggctcattaagtccccgagccgctgtttatcaaaaaacggaatcggcagctcatggagatgggtaaacagctcgctccgcattttaaacacggtgctttgcgagatattgatcatccaatagttttgaaaccataaggacaatgattgcacgaggtaaatcccaaacaggatgaacagcacccccgccaatccgtctgtcgtctgtccgacgataaaatgatcaatcgctttcccgatgacgaacggtccgagcaggccgaatatggcgcttatgactaccatgatgatcacaagggttaaaagcccttttttctcggctacataagaccagattctgcgcagcgtgccttttgtatcttttgctttcgcgcgttttctgccgccttcattcgatttgagcggtattttcggatatcggaaaggtttacgaatgtctttttgcattgtcagctccctcctttccgaattgtgattcataaatctgccggtacagatgagactgcgccatcagctctttgtgcgtgcctttggccagcagttcgccgtcttcaagcaataagatggtgtcagccttcattgcagtcgttattttctgcgtaataatcagtgtcgtgcattcataggatcggatcgcttgtaaaagcttcgcttccgtctgaagatcaagcgcgctcgtactgtcatctaacagcaggagggacggctttctgataaaagcgcgcgcgattgaaatccgctgcttctgcccgcctgacaaattgacgccccgctgtcccagcaccgtgtcatacccgtttgacagcttcataattgtttcatggatttgcgcgtctttggccgcttccattacttcatctagtgaagcatcctcccgcccccaggcgatattttcacggatggttcccgaaaacagaagcacttcctgcggaacatagccgatttccctgcgcagcccgcaagcggagaatacaccgatcggtttgccgtctatgaaaatactgcccgaatcagtcgtgtacaggcgcggaatcagctgaaaaagcgttgattttcctgagcctgtcgcgcccataatggcaaccgtctcttttgggctggcagaaaaggacacgtgatgcagcgcgtctttttccatgcccggatagcggaaggacacttcgcgaaactcaatcccgcctgcaagcgcccgtgccgggtcctgccccgttccctcgccgccttctgtttccagcacctcgccgattctttctccggaagccttcgcccgggaaaataccatgatgagaaaaggaaggacggacagcgcacctgtaatccgcgtcgcatagttaatgacggaaacgacatcgccgacctgcgctccgccctgagcaatgcttttggcgccgaaccataagataaacaaaatgcaaatgttcatcagcagcattaaaatcggcatcgccgcttccacgagacgaaaagcggagaccgttttttccatcagcttcgtattcgatttcaaaaaacgtttcacttcgtggtttgcacggaggagcgctttaatcagtttgatcgccgtcaggttttcctgcatgatcgtgttgacctgatcaagccgcttttgcacagaccgaaacagcgcgccgcctcttttcagcacccacagcaaaaacaaaagcaaaatcggcaccgtgatcagcagaaaaaacccgagtttcgcattgacggtcagcgagagaataatgccgcctgcgatcattaacggcgcacgaagcataaaccggagactcatgaaaagcatattttggacctgtgtcacatcgtttgtcagccgggtgataaacgatgtggatgagaattgcgcaaacgtcgaataagagaaggattgaattttttgaaaaagcccctttcgcgtatcatacgcatagctctggctgatgtgggcggagtagaatgaatttaaaatgcccgatgcgaatgaaacagcggtcagtccgatcatcacgccgccccacagccaaaccgtaccgagatcctgctttaaaattccttcgtcaatgattttcccgatcagcaggggctgtatcagctctaccgcaagctcgatgagcatgaaaaacagagcgattcccgccaaaagagaatacggttttacatatgataaagcctttgacatgtgtaagcctccaaatcctttgttcaatatgtatgtatatttattttatttgtttgtcttaaatgaataaaggattaacccttgaacccgtactttaattatgtactttgtgtaaaaaaaaacggaaatcattgaggataaaaattgaaggaatgaggcgtgcagatatatggaggctgtcttatcttttcttattaccagcttttgaatcggagccttgatattaaaatgaattagcggagcctttaaaaaggcgtccgctattcaggatggtcatttgtgctttgtcatttcatttaacgaatgaaaacgagagcgaccccgaatcctttatcagcatcaaactcattgatcactttcatgacctgccagcgctggtttgaagcatcagattttgttgcaatcccgttatgagcgtgaataaaatctcccggtttcacagtctcatcgcatctgacatatacctggccgatgagtccgacaatgttccattcgtctctctcttctcttgaagcgtagtcttcttcaggccgaaagtccggattttcctttggcgccatgaccgtatggccgttcgcatctttctgttcttcataaacatagccgccaaaatcattctttacgtatcgtcccgaccagtgaaaactcgactcgccaagaatcactccggcggtctcggaaatgaccccaagcatgaggtcacctttttcagcctgcctgatcttatcaccttcaagtgtgacaagtgttcccgtcggaatcttctccccgctcaggctctcaaaatactcggcgtagtcagagaatgtcgaggaacctgttacgcctcccgcagccttaattgttccttcttttgcgtgaagctcaatctttctgttggctgatgacggagtgctgccggaaccccagccccatacagttgagttcgcatttgggttaatcgtattatatgaaccgattactccagattgagaacctcctgcagcctgcccccggacagaaccgacgacaaagccattagttcctgtaacatgggaatctttagatgccataacagaagatcctttatgtttaaacaactcatacggtgtttttttaccgcctacatgaaatgttgtttcatatccttgaaaatcaatatttgatatattcagatccggacccgaagaataaagtccgaccgttccgctcccagctcccaatctatgcccgtatacattgctcactgtacaattatcaacgcctccgccaaaagcaagccccgtcgtgccgccgtcaactagaaaaacgccgtcaatcatgcacttacctaccgcattttcgccgccaagaacatacagatcatgagcagcggagcggaacccgcggatcgtaatattcttcatattgacataccgccctttgtaataaatcataatgatcgtgtcattgctgtaatcgtatgaacgatcttcacaaatagcttggaaattcactatattaactgaatcatagcccgaaacaaccaacgcactcgctccgacgcctttatatatagaattttgtttaggatttgttgcctgacaatttactaattggacatcatgggcagtttttgatgtcggctcagccgataaatgatggccaatatgtctaatgcaaaaaccgatcgcattttcgtaagcacggcaattagccagttgaactcgtttagccgccggtgcatagtcatgcgccttaatttcaaaaccgcgtgcaccgccaattgcaacacagctatctacaaatacatcttgagaaccgtcatcgatctcaaagcaatttgaatttgacgtgccattcccatttcccatcgggtgataggaaacacagtggctgaaagtagtgtggaatccaaaatgacaagtaaagttatcatccccggaccctgttgcttcacaatgtgaaaacgttacaaagttacagccgttgggctgataataagttggatcatctttttctccatgtctgttatagttcgggctcgtggaatcaaagccgtgcaggccggcgttcttcgcaaacacatgctcaacaaaagaatagtcaacattcgcaaaaagcaaacagcttgaagtgggacctttcggaatcttccagccggcaggacgcgtatccttgttccaatccaaagtgagatggccgacataaatattttcattaccgttcgtataatcactgttggtcagaacagaatggccgaccggtgtttcgtctaataatttaatgaccgttcttttcttgcctgctccgacaagcattgtatttgaaggaacaaacaatcccgatgttctgaatacacccgcgggaactgttacgacataacctccgtcggccatggcatcatgaaatgcctgcgtatcatccgttacgccgtcacctttagctccaaaatccataacgttccgctctgtcacatgttcaaatctgttttcatacatgttaagtctttcgtttaaattttcataagttgacgtgccattgctaagcgcagcaccgattttgctgtcaatcgcttcaaaattttgagcaatgctttcaacctcaatcccctccattttatcgggtttgtaaagtcctaagaaagtcgtatagtttgtcattgccttgcctcctatttttgaattgctgtttaaaacaccgaacaccacagaagtctttcgttttcactcctgcatgtacaggtggcaaaggtatgacaaattcatacattttttcaaaacataaaaagagcgccggattaacaagcgctctgcacatagtctgctgctgcagtattttagccattcaatattttctcgacacgctcccgcatttgcggaacgcctaatccgacaatgacctgaagcgccctgccttttctgacgaccccgtgggctcccagctctctgaaatcggcgtcacttttgacctttgattcatcagcgacagtgacgcggagacgggtggcgcagttggtgacctccgtaatattgtcctttccgcccagcgcttcaatatacaaagcggctgtatcccgctgtgtttcgtctgccgccgctgtttcttttgaagcctgcttccgttctctgtactcctttttcgaatagagctttgtttcctgcccttcctctttttctctgcccggtgtggcgatgttgaatttgagaatgaggaaacggaagacgaaaaagtaaacagcggtaaaacacaacccgataatgatctggtatacatacgtcaagccgtgacttgacgccagcgggatccagttcaaggtcgcagcttcgatcaaaccgcctcccatatttccgacgacgccggccatatacatgacggttgccatggaagcggcaagcaaagcatgaaccgcaaataaaaacggcgagataaaaaggaatgtaaattcaatcggctctgtaattcccgcgacaatggacgtcaaggtgaccgggatcaataggccggcgacgatttttttcttttcctttgaagccgtggcgtaaaaagcgagcgcgattcccggaatgccgaagattttcgagtttccgtgaagcgcgaagcccccctgcgggaacaattctttcagcggtttgacgctttgagagtattccccgagatgctgcgcccaataggtgacgataccgccttcagccacagccggaccgtaaacaaacggcgagtaaataaaatgatgcaggccggtcggaattaaaatccgctccaggaatgtgtaaatccacacgccgatcgccccggaagaaacgagaaaactttgcagcgagccgattccggactgaaccatcggccatacgtatgccaccgcaagtgaaatcggtatcataatgaagaaagaaatgataacgatgtatgaagatccttgaaaaatacccaggaaatccggcagttttttatcaaaataacgattgtgcaaatacacgacaatagatgaaataaagatggcgccgataatattcgtatcaagcgttttgattccggcgatcatcgtcagcccgctcgttccgccggcttcctgattcatatcgacgtgaaaagccccgccccaaaccgtcagaatcgcattgataaagtaattgaatgtcagataaactgtaagcgcttccaaacaagcccgcgcctgcgcttttttcgctaaggcgacagggatgccgatcgcaaacaggagcggcatttgattaaagacggtccagccgccttgttcaatgacataccagcattgataccaaagcccgtcaggatcagccagcggccccatcagcgttttatttttaaacagcgtactcagaccgacaataataccggaaaatgcaaataataaaacaggcacaaacatcgcgctgccgaagcgctggactttttgcatcatttcacgtgacctcccgctatttatcaaaattttcgagctctttataatcaacatatgcacggaataacgcttcgcccaccagaaaaaacggggcaaatgcgacgatttccgttttatcgcttaacgtcaccggcttgctggtcgcataaagattatacggcgtcgtttgcgccagtacgttgtttttcagattggtgattgaaataaacggaactccctttgcggacagggtccttacctgcggaattaattcgggtgtttcgcctgataaagaaataatgatgaatacgtcatcaaccttaaaatcatcacacatgatatcaaactctgtgatgtcctgaattaaaatcagatacttccgccgggatacaaacatccgctgcagctcacgggcgcacaccctctgagccgtgcccgatccgtaaacgaaaatccgttttgcttcatctatcagccggcacatctccgtcatatcttttgacttcacatattttacattggcttcaatatcatccagcagcttttcaaacgtcatattctcgccctcttcaggctgatcctcccatttaagaaaaacccggaattcactgtagccgctgaagcccagtttttgggcgagccgcaggacggaagaccgagagacattgcaggctttcgccatgtcattgataccgagatggtagcacgtatgtttatgattcaatatatattttaaaatataaaaatcgttgtcatttaatttcgcgtaatgctgattaaccagttcttcaagactcatcccaaaaatccccccgttttctttctattatatagaataacagataaagaaaacggggaagattgtcatcaggaaataggagacggactcacatcaagctcaggccagtagtccttattagcctccatcagatcctcaagaatcagtcttgccacacgggcattcggcactgtttttgacaggatcagcgcctgccacagcttttgaaatgaccgctcttcccacgcttcagccgtcagtttttcgacagacacctgctgttccatcaggcctttttgaaattgcggtatattcccgactgagaggggttccggtccgtttgagcctacgagacaaggaatctcaaccatggctgatggatcaaagtttgcgatcgcgccgttattttcaacgattaacagcattctctccccggtgttgtaagcgatggcccgggcaaggtcgacgatataggaagcatgatcatcaattttaatttcactcttctccgatgattgttcgcgcgtaatcatatcgcattggctgaaaatgaaagcttcgcgcccttccataacttcattggctctcgtatggttcgggtttgattttttcaccatatcatccgggaataagtaatattgcagatatgtgttcgggagcgtatccggatcagccgcctgtacgtcgcgcgcttttttgaatgtgtcattccagcttgcttcagtctgttcggcctccgtcttcggaacgtagccgtattcacggacatgctctttcagcttcggcattaaatcattgccatgccggtctgtgatggacgtccaccagccaaagtggtttaagccgtagtaacggacgttcatttcttttcgtgaagataatccgaggatgttcgccatgcgatcctcaattccgaccggcatgtcgcagatgttcaatatttttgaattcggtctgaggcgccgtgtagcttcggccacaatcgccgccggattggagtaattcagcatccatgcgtcaggcgagtacgtttccatataatcaagaatctccagaacaccgccgatagagcgcatgccgtatgcgattccgcccggcccgcatgtttcctggccgaccacgccgtacttcagcgggatttgttcatcaagcgcgcgcatcgcatattttccgacgcggatatgcgccatgacgaagtcaacatccgtaaaagccatctctgggtcatcagtcgccaaaaattcaatgtccggcgctttttcttttatgaatacctcacacgcacccgcaatccgctcctgcctttctttatcattgtcataaagtttcagctttctgatcggaaactcttccaggtgattcaaaagcattaatacaattccgggggtaaatgtgctgccgccgcctgcaataacgattgagaatgatttgtctgtcatgtgaagccctcctctgataacgtttacattttatttatatcatgagaaggtccgatctgtaccgggtttggaggagttagatcatttaatcatttttagttatttttctcaaaaagcgggaaagttcccacaggtacgaaagaggcctgctgtcatcagcagacccattctcaaaaatgctcttgtaaatcagaaagcagcacttcctgctcaaattgaggatttccgatcggaaaaatcctggctgtttccttgtcttcgttgacatgctgaatataaatcggaactccttcatacgtcacatacgccatggcggcggattccgaaatgtctttcgcacgctgtgtattcacgtctcaaacctcctttaggcctcacacataacgtgtccggcagccaagagaagtatgcttgtttcttacaattgtccggcggtgagtttgaattttttgagacgtttgtaaaacgtgctccgcgggattccggccattttggcggccagcgtgacattccccttcgccgattcaagcgcgtttacgatgatgtttttctgaatgtgctcccggatggagacaggggacgcttcttcctgttcataagactcggccgcctctttaagacctgacgcttcaagcagggctgcgatggggcgccctgacagccgtccgtccgggaacatgacggaaagacgttcaaatacattaaacaattccctgatgttccccggccatttccggctctttaataggtctaaaaagtcatcaggaagctccccgcgccagccgcggtttcgctgaaattcaaggaagagtccccgaatgtcttcggtgcgttctcttaatggagggagatggatcggacagacgtgaagccggtaaaataaatcttctctcagctttttgcattcgacaagctgtctcagatcagcgtgggttgcagtgatgattctgatgtcaacgggaatctcttttgtcccgccgaccggggtgactttccgttcctgcagcacccgtaacagagcgacctgcatggagtgtgatatttctccgatttcatcgaggaaaagcgtgcctttatcggctttttgcaaagcgccgttatgtcctttccgtttggccccggtgaaggcgccttccgagtagccgaacagttcgctttcaatcagcttttctgggaccgctccgcaattgacggcgataaacgggccgtttttcctggagctgttgttatgaatcgcccgggcggcaacctcctttcccgtcccggtttctcccgtaagacaaacggttgcgtccgttcgggcgacaagctccagctgctgaagcatatgtcgggatgacgggcttttgcctgccgcaccatgaaatataaaagacggcttttcttctcgtttggataaataaacgcatgtgcagccgttctcctcccgcttcgcctgcttgatgtgatagccctgttcctcaagctcgcgcagcgtatgtccggtaaaatgctgaacgggacggcttgcggcgataacccggctcatttcattgcaaagcacgattggatcgtgtgaccgggtcagcccggtgaatttgctgatcatgtcaagttctgtcattttgatctttagggcaagctcccgttccgccgtataagcgatggaggaggcaattccgagcataaacggctgagcgcgggcggcggggcaggaaatatcaatgacacccgccagccgcccgtcttcataacggatcggcgcggcggaacagctccattgatgagaagcgagcgaataatgttcagagccgtgtatcatgaccggctcatttgtataaagagccgtcccgatcgcattcgtgccgacggccgtttccgtccagcgggcgccttttaagaaattgatgcggttcgcttcatgaatggtgcgcgggtgaccgtcaactgaatggacaacgccgtctgaatcaatcaggagaaccatcatttccatttcccgcattgccgttttcattctttctgcatgaggcattgaggctgctaaaaataatgaatgcttctcggcctgcctttctaaatgatctgccggcattacattcggccccttttcgagataagggttgacgtcggcttttttgcagcggtgccatgaggcggccacccgcttctgaatacgggattcatcaagcacaccttctttcacaaagcgcttccaggttttaaaatcattccgaatgacattcattgtattcgctcccccctgttcagaccatcttttcatatattgtaggggaaaaataaagcgctttcaacgaaaaataccccttctcatctgagaaagggtattccggttatacggaatgcaccgcaagtccggtgacattcagcagggcttcctgaagcgtttctgacagagtcggatgcgccgcgataaagtgctccgacatatccgccgtcatttcaccgttcatcatcatgaccgcctgaccgatcaattccgtcacgtccggcccgatcattgacacgccgacgatttctccgaattccggttcggcaatgattttcattttgccgccatgctgatgtttaattaacgcttttccgttagcagaaaatgagcattctccaattttcacatctccgtatgtctctctcgcctgtgtttccgtcagcccgacagcggccatttccggtgatgtataaatacagcggggcaccgcccgcatattgactttgctgtcctttcccgaggcatgcgcggcggctgtgataccttcatgaatggcggcatgcgcgagctgcattcctccggccgcatcgccgcatgcgtatatatgaggcacattggtctgcatatggtcattgacttcaatgccgcgcggagaataccggatgccggcctgatccagattcagcttttgcaaacgcggttttctcccgattgcaaccaaaacgtgatcagcctgagcctcaatttctttgccgtcttttgtccacacggcggttttcctttctttgtcaatccgctgaagggcggcttttgtctgaatatcagccccgctgtctcttaaagagtcttcaaaaacggcggcgatttccccgtcttctgccgggagcagccggtcagccgattcaatcaccgtcactttcgttttaaaccggctgaataaagaggcaaattcacagccgatcacacctcccccgacaataagcagggaagaagggattttctgtaaagaaagcgcgtctttgctgtcgatcacccaatcgccgtcaaatggggcaaacggcagctccgccggttcagatccggatgcaatcaatatccgatccgcttccagaatgtcttttgcgcctccttctccttcaacaagcaatgtctgctctgtgagaaatgaagctgtcccgctgatgactttaatctgatttgctttcattaagtattgaattccctgcacgagctggctgacgatttgccgtttgcgcccctgcatgcgagcccaattgagtgtaatgttttgcggcagttcgatgccgaatgtatctgcgtgcctgattttatcgagcacattcgcgctttccaaaagcgactttgtcgggatgcatccctcattgagacaagtgcctccgagcggccctttgtcgatcagaacgacttcttctcccctccgcgcggcagtcacggcagctgcatatccggcaggcccgccgccgataatggctagtgtcaatctcttcaccctctctataaaatcaatccggccggctcttcaagcagcgctttgaccgttttcaggaagtccgcagccggtgcgccgtcacatactctgtgatcaaaggtaaggctcagcggcagcatggtgcttttgacaagctcatctcctttaaacgcaggcgtttcatagcttgcgcctactccgagaataccggcttcaggcggattaagaatcggggtgaaatgctcaattccgtaacccccgagatttgtaatagaaaatgtcgatccgtgcagatcatctccggaagcattgccttcccgcgcccggcgtgccgatgtgctgatgtgatccgcaagctcaaggaatgaaagcttttccgcatcccggatcaccggcacgacgagaccgttttcaagagaaaccgccatcccgaggtggacatatggataggtgatgatccgctcctcttgataagagctgttcagctcaggatgctgtttcagcgcaagcaccgcggcccgggatacgaaatgtgtgaccgtcagtttaacaccgctccgctttttcgcgctgtcggcgagctgctgctgccattttacaagctccgtaatgtccgctttcatcgtcagcgtcagctgggcgctgttttgcaggcttttgtgcattcggtctgcaatcacttttctcatcgctgaagccggttttccctccggctgtgccgtctgaaccgaagactgcggttcagattccgtcttcattgccttgatgacgtcagcttttacgatcctgcctccgggccccgtcccgttcagcgtatcaactttcaacccggctttctccgccatttttcgggcaacgggagatattttcacgcggtgtttacgcttttgcacggctttgggagcaggaatatgttcagattcaggttcagattgcggtttccctgcattttcaggagccggcgcctccttctcccgcacttcttcgccgttttccccgatataacagatgggcgttcccggcgggactccttctccctctttgactttaatgtgaagaagcgtgccgctttcaggcgcttctatttccatttctattttttccgagttgatgctggcgatgctttctcccttttcaaccgggtcgccgacttttttattccagacggatacttcaccttgcttcatcgccattcccagcttcggcattactacttttacagccattctatatccctcctttaattcattgccggctcgccaagcaattcaagcgtgacgctgacaatttggtctggtgtcggcaaatattgatcttcaagcaccggcgaaaacggtaccggtgtatgcggcgctgtaatccgcttaatcggcgcatcaagcaaatcaaagcccttatcggcgacaatcgcagcaatatccgtggcgatgctgcagcgcggattggcttcgtcaatgatgatcagccggtttgttttttctaacgatgtgaaaatcgcttcctcatctaaaggagacagactccggggatcaagcacctcggcgtcgatgcctttctcagaaagctgtgcagccgcttcaagcgcggtattaacctgcttgccgaccgcaaacagcgtgatgtcgctgccttcgcgtttaatatccgcttttccgagcggaattgtataataatcttccggcacctcacccttcatgttgtaggacgttttgtcttcaaaaaagaataccggatcattgtcttctattgccgaaagcagcaaacctttggcgtcatatggattggacggcacaaccgtcttcagacccgggatgctggtgaacaggccatacagcgcctgcgaatgctgagcggctgcccggaacccggctccgtatgtggtgcggacggtgatcggcacttgcgctttaccgccgaacatatagcggaatttcgccccttggttgatcacttggtcaaagcacgttccgataaaatcgttaaacatcagttccgcaatcggtctcagccccgtggatgccgcagccatggccgcacccatgtagcccgcctcagaaatcggtgtgtccagcactcggctgcgcccgaattcctgtacaagcccctttgtgaccccgagtacaccgccccatgcttcatcatcttgcaaatgatcgaccgccgctcccccggcgacatcttcaccgattacaagcacattgtcgtcttttctcatcgcaagcttcattgcttcattgatcgcgtccgacatgcttatgactctcgccatctcacattccccctttttcatatgacacgtagacgtctgtcaatagctccgactctttcggatatggactcttttcgctgaacgagacggctttttcaatcgattcgctgacacgctgttcgatgtctgacagtttatttgcatctgtttcttttagaagatagtttttaaagccttgaatggcatccttttcttcaagatgctcagtcttttcatcctttgttttataagtttgggcatccccttcgaaatggccgtagtttctgtaagtcatacattcaatcaaagacgggcctccgccgtttcttgctctttctatcgcttccccggctgcctgataaactgctaaaatatcttttccgtccaccgtgacccccggcatgttgtaggcagccgcccgatcggcgattgaatcacaggctgacgcgtactcaaatgtcgtggcttcgccgtagccgttgttttcggcgatgaacacgacaggaaggttccatactgccgctaagttcagcccttcatggaaggtcccttggttattggctccgtccccaaaaaagcaaacgcttacatttttagtttgtttatatttagccgtgagcgctgatccgcatgcgagcgtaaagccgcccccgacgattccatttgcgcctaacatgcctttatcaagatccgcaatgtgcatagaaccgccttttcctttacacagtccggtcgcttttccgaatatttccgccatcatgccgtccagatcacagcctttggcgatacaatggccatgtcccctgtgcgtgcttgtaatgctgtcgccatcatctaaatgagcgcacacgcctgcagctaccgcttcttcaccggcatacaaatggacgaatccgggaagcactccttgcgcgaacagttcatgcactttgtcttcaaagcccctgatttccagcatcttttggtacatccacagcgctttctcctcagttaatgacaagccttctcgttttaacaattccattttgtgcgcctccttctatttagggttcacacttataaatgcaagaagcatgccagcctttgaagcccgtaaaatgaatgtttttatttttacaatggagacagtttgagacaggtgtctcattttgtctcgatctgttctctttgtctcgttttatggcatacaaaaaagaccgggcatcaccctgtctttgacaacgatcgacgtatttatttcctcggaaatcttttaactgcttcattcttctgcatacagtctattgcggcgtttgagtggttatactctttttttcatatccgcgcgtgctgcaagttcatgcttttcttcaacagcccgattcagcgcttgaagcatatagccaatgcctttatacgatgacaaaggccaggtgatatgctgatgctctccgatgacggcgtttaggacgcttcggtattttttcccgccaagcatgacaagctcttcgatgtcggaaaagcctttttcatgaaattgacggcgcagctcgtccgctgccatgatctccggatgaccggttccaaaagtgacatcgtaatttcctggaacaatatcatccggacgaaggaatccatgcttcgccgacaaaatcacccactcatcgaaaaatgctttcgcatattgctcgcacgcctggtgaaacgggctgagataagcgtcttccgcccttaccggccctgtatctgaatggacatcccaaatttttttcttgccgcaggggatgatgcacagtcgtttcatttttctctccccctttatgatgtatctcctatcaatgtaccattattcgtttatttctgcatgacggatctgtctgggtaaaagctgcacacaaaaagacccggaattcaaaccgaactccgggccggatgaagagttgtttatgtcactcttgctccatcccctcaagatactttctctcaaagtcatcgagcaatgcacgcacttcatctgttgactttgtattcatgcattgatttcttaattcacttgctccccgaaatccgcggagatatatcttgaaaaagcgagggagcggtttatatgctcgagcttctgcttttgaatattcatcatgaagatccagatgcaatctcaaaagatcaagcaattccttactgctatgctctctcggctccttttcaaaggcgaatggattagtaaaaatgcctcgtccaatcataatcccgtcaacaccgtattgttcagcgagtttcaagccggtttcccggtcaggaatatccccattgatcgtcaaaagggtatctggcgctatctcgtcacgaagtttcttaatgtccgggatgagctcccaatgcgcatctactttactcatttccgctcttgtacgcagatgaatggaaagattcgcaatgtcttgtttcagtatgtgtgtcagccagccgcgccattcgtctatatccgtgtagccgagtctggtcttcacacttaccggcagacctcctgctttcgccgcctgtattaattcggctgcaacttcaggacggcaaatcaggccgcttccctttccattccccgccacattaggtacaggacagcccatattgatatccaggcccttaaaccctaattccgccatcccaatactcatttggcgaaagttttcaggcttatctccccatatgtgggcaaccatcggctgttcatcctccgtgaaagtcaaacggccgcgcacactatccttcccatccgggtgacaatagctttctgagtttgtaaactctgtgaaaaacacatcaggtctgcctgcttcactcacaacatggcgaaaaacgacatccgtcacatcttccattggtgccagtacaaaaaatggccgtggtaattcacgccagaaattatctgtcataacaaatccaaatcctttcatgatgggatacagccaaacctttatcccaaaattaaaaactgaccatgcttcttttacacttatagcatgtgtcagcacttcttatcaaacgatagtaaattttgaacatttcactttttacacgttaaaaagtgaaaagcaaactgaagtagaatagatatgatagaacaccttacaactccttaaccatataatcggttcgaaagagaaaaaagtgtgctgattatctacacctattttttatttatattgtggtttattaatagtagcgctgaccttcatctttcttagcggccttacttttgctctttttggacaaaaaggattccaacctaaatagaatatcatatgagttctcccttttaccaatgcaaaataattgtcctgttatcgaagataaaatatttaacgctgcaccatatccttatctcaatatcatttacgaaaaaataatttgattaagcaaatggggttggggcggtatatctgagtactcaagagaatgtaaaaagttaacttgccgcttgtgaatcacatggagtaaagaggatgggatgggaagagaaaataaactcgaacttaacagaattcaagaatttcaatctggattgtttgggatttgctcatggtttagaaataaccaacgcagcaagtggcagcctgacaaaggttgctttttctttctggctaaaatcaactgttccaatacgtatatgtgctaagggtcgattggctttcaagaccccgtatgctaatcaatttttagttttaaagttattacatataaacacaatatctgtataaaaataaatacactcagtaatttatataagggacccgtcggtaattctgatccagaaccaataaaatagactgctgactatgtgtcgcagtctcattcataagattaataagaaagtgtttattttctttcatcattaaataaggcatcagaagttattgctttcatttcgaatatcctttgttatacctatgattatttgtataacagtgaaaacccccaagaaaacagtgacaatattaaaccatggattatcatagaatgaaagatatgtttgaaagaaatccagttcaactatgtttgctgggaatccattcatttctctataattaggaccccatcccgttaattctacaaaattaaaataaagctgtgaaactaaaaatgccaacaacgtttgaaaccaacttcttttaaataacggtcgttttttgtttactttatccatttcattatccgtttccttttctgcaatactttttagccaggtgtcaatctataatcattatattatgaagcatgattgtcacaataattgcttattaaggatataaccattgtaggtattactgtaatagttgttatcgttggtcccacttgcggttccacctcagcacttttatttaattgttgtaatgctaatacgttattcattattattcctccattcttcatttaataatttaacatttttgaatttagtcctacatataaattaagaactaagtcacttcattcatttccattgacaataattaagaagtatgggatagtgaaaagaatttatatgaaaactaaaatttccttttttagaaacaggaaaaggattggggtccttttcctgtttaggctttcatataatgtataacgaccaagcgtacttttttagtgtgtttggtcttttatccacagttgttgctaatagtagatgtgcccactaccgttgtgatcagtgtaagtaagccgcctttgccttttgaagcttc

SEQ ID NO: 37 - DNA, 59785 bp, Bacillus velezensis
  source 1..59785: mol_type = genomic DNA
acacggaagttaagctcttcagcgccgatggtagtcgggggtttccccctgtgagagtaggacgccgccaagctatcattacggtaaaggcagctcattatgagctgccttttttgtgtttttttgcatacgttatataatatgagaaacgtaacgatatgcctttttgcaaaagcaggttttatgcttgtgcaaagtggaaataatagagatagagcgatacagttgaaaaattttgcgaaacaccttatagtaaggttaaagtcaaatatagtcaaagtcaataaaggagggggttgagtgggacataatatttctgacatcattgaacagtacttgaaacaagtattagatcaaaatggcaaagaaattttagagatcaaacgcagtgaaatcgctgataaatttcaatgtgttccttcccaaataaattatgtcatcaacaccagatttacaagtgaaagaggatatattgttgaaagtaaacggggaggcggcggttatattcgtattatcaaaattaaaatgaataacgaagtcgtcctcatcaataatattatttcacagattcatacccacttgtcccaggcagcctctgatgacattattctcagactgttagaggacggagttatttcggaaagagaagctaaaatgatggtgagtgtaatggatcgttcagttctatatattgatttgcccgaacgggatgaactaagagccagaatgatgaaagcaatgctcacatctttaaaactaaagtaagcgggtgaaaagattgatttgtcaagaatgcaatgagagaccggccacttttcactttacgaaagttgttaatggagaaaaacaagaagttcatatttgtgaacaatgtgcaaaagaaaatagcgattcatacagtataagtggaaaccaagggttctcgatccataatttattatcagggctgctgaatatggagtcttcatttcaaaacaccggttctcaaatgttcggctactcagagcaagccacagcttgtaagaaatgcggtatgacgtttcagcagctgagaaaaacagggcgtttcggctgtgcggaatgttacgatacgttctacagccaaattacgccgatcttgcgaaaagttcacagcgggaatacggtgcatgccggaaaaattccaaaacgaataggcggaaacctgcatgtaagacggcaaatggaaatgttaaaaaaagaacttgaatctttaatacaccacgaagagtttgaaagagcagcggaggtcagggatcagatccgatcgttagagcagaaattaaaaagtaaagacagtgagggggaacaagggtaatgtcgctcaagcattttattcaggacgcactaagcaattggatgaagcaaaagggacctgaaagtgacattgtactcagcagccgtatacggttggcccgtaactttgaaaatataaagtttcctgccaggtatacgaatgaagaagcctcatccatcattcagcaattcgaagatcatttttcaggaaaagaacttcctgatatcggtcaatttcatttaatcagaatgagtgaagctcagcctttggaaaaacgggtgctgatggagaaacatctgatcagcccgaatttaacagaatccccttttggcggctgtctgctttctgaaaatgaagaagtcagcattatgttaaatgaagaagatcatatcagaattcaatgcctcttccccggcttccagcttctcaatgctataaaagcggcaaaccaggttgatgactggattgaggagaaagtggattacgcctttggagagaagagagggtacttaacaagctgtcctacaaatgtagggacggggctaagggcttcagtcatgatgcatttgccgggccttgtattaactaggcaaatgaatcgaattataccggcaattaaccaattaggcttagttgttagaggaatttacggtgaaggcagcgaagcattaggaaatatctttcaaatttcaaatcaaatcacactcggaaaatcagaacaggacattgtagatgatttaaacagtgtggctgcccagctgattgagcaggaacgttcagcccgagaagcgctttaccaaacctcgaaaattgaattggaggaccgggtattcagatcttacggtgttttatccaactgccgtatgattgaatcaaaggaaacggcgaaatgcctttctgacgttcggctggggatagaccttggaatcatcaaagggctatcaagcaatatacttaatgaactgatgattttgacacagccgggttttctccagcaatattcgggcggtgcattacggccgaacgaaagagacgcgagaagagcggctcttatcagggaaaggctgcatttagaaatgagtgcaaatagacaggaggatgattcgatatgatgtttggaaggtttacagagcgagctcaaaaggtattggcactggcacaggaagaagcactgcgcttaggccataacaatattggaactgaacatatcttattaggtctggttcgtgaaggagaagggattgcggctaaagcactccaagcactcggactcggttcggataaaattcagaaagaagtggagagcttaatcggacggggacaggaaatgtctcaaacgattcattatacgccaagagcaaaaaaagtcattgagctcagcatggatgaagccagaaagctaggacattcttatgtgggaacagaacacatacttctcggactgattcgtgaaggagaaggcgtggccgcgagagttctgaacaatctcggtgtcagcttgaataaggcgagacagcaagtgctgcagcttctgggaagcaatgagacgggatcttctgcatccggtacgaacagcaatgcaaacacgccgacgcttgacagcttggctcgtgatttaactgcgattgcgaaggaagacagtcttgatccggttatcggccgaagcaaagaaattcagcgtgttattgaggtattaagccgcagaacgaagaataaccccgttcttatcggagaaccgggtgtaggtaaaactgcgattgctgaaggcctcgcacagcagatcatcaataatgaagtgccggaaattttacgtgataaacgcgtaatgacattagacatgggtacggttgtagccggtacgaaataccgcggagaatttgaagaccgcttgaaaaaagtaatggatgaaatacgtcaggccggcaatattattttattcattgacgaactgcatacgctgatcggagcggggggagcagaaggtgcgattgacgcatcgaatatcttaaaaccttcactggcccgcggagagcttcaatgcatcggtgcgacaacgcttgatgaataccgtaaatatattgaaaaagacgcggctctggagcgccgtttccagccgattcaggtggatcagccgtcagccgatgaaagcattcaaattttaaaagggctccgtgaccgctatgaagcgcatcaccgcgtatccattaccgatgaagcgattgaagcggcggtaaaattgtccgaccgttatatttctgaccgcttccttccggataaagcgatcgatttaattgatgaagccggttcaaaagtgcgtctccgttctttcacaacacctccgaacttaaaagagcttgagcagaaactcgatgaagttcgcaaggaaaaagacgctgccgttcagagccaggagtttgaaaaagcggcttcccttcgtgatacggagcagcgcctgagagaacaggtggaagacacgaaaaaaacgtggaaagaaaaacaaggccaggagaactccgaagtttctgtagaggatattgcgatggttgtatccagctggaccggggtgcctgtatctaaaattgcccaaacggaaacagataagcttctcaatatggaaaacattctgcactcccgcgtcatcggccaggatgaagctgttgtagccgttgcaaaggctgtcagacgtgcaagagccggtctgaaggacccgaaacgcccgattggttcattcatcttcttaggccctacaggcgttgggaagacagagctggcacgagcgctggcggaatccattttcggtgatgaggaagcgatgatcagagtggatatgtccgaatacatggagaaacactcgacttcacgtcttgtcggttctcctccgggatatgtcggctatgatgaaggcggccagctgacagaaaaagtgagaagaaaaccttactctgtcgtactgcttgatgaaattgaaaaagcgcatcctgatgtgtttaacatactcctgcaagtgcttgaagacggacgcttgactgattcaaaaggacgcactgtggatttccgcaacacgatcctgattatgacgtcaaacgtcggagcgagcgagctgaaacgcaacaaatatgtgggcttcaatgtgcaggatgaatcacaaaaccataaagacatgaaagacaaagtcatgggagagctgaagcgtgccttcagacctgagtttatcaaccggattgacgaaattatcgtcttccactcccttgagaaaaaacatcttacagacatcgtgtcgcttatgtctgatcagttaacaaaacgtctgaaagaacaagatctctctatcgagctgacggatgctgcaaaagcgaaagtggcagaagagggcgtcgatttggaatacggcgcacgtccgctaagaagggcgattcaaaagcatgtggaggaccggttatcagaagaactcctcagaggcaatattgataaaggccagcacattgttcttgatgttgaggacggcgaatttgtcgtaaaaacaactgctaaaacgaactaatatagtgacaaacatgaggcatacgtaagcgagtgtatgcctcactttgttatatagagaaatattcgataaggaagaggtcttacaacatatatggctaaatcaaaaacaaaattcatctgccactcatgcggttatgaatccgcaaagtggatgggaaagtgcccgggctgcggggcttggaatacaatggtggaagaaaccataaaaaaagcgccggcgaatcggcgggcggctttctcccactccgttcaaaccgtccagaaaccatcacccattacatcaattgaaacatcggaagaaccccgcgttcacacaaagctcgaagaattcaacagagtgcttggcggcggcgttgtgaaaggctcgttagtattgatcggcggtgatcccggcatcggaaaatcaacgctccttctccaagtatccgcacaattagcagatacggccggcagcgtgctttacatttcaggggaagaatccgtgaagcaaacgaagctgcgcgccgacagacttggaatcaacagccaaatgttacatgttttatctgaaaccgatatggagtatatttcgtctgctatacaagagatgaaacccgcatttgttgtcgtagactccattcagaccgtgtaccaaagtgatatcacctcggctcccggcagtgtatcacaagtaagagagtgtacggccgaattgatgaaaatcgcgaaaacaaacggcatacctatttttatcgtcgggcacgtcacaaaagaaggatcgatcgcagggccgagattgcttgagcacatggtcgataccgttctatactttgaaggagagcggcaccatacattccgtattttgcgggccgtaaaaaaccgtttcggctccacaaatgaaatgggcatctttgaaatgcgggaagaggggcttacggaagtgctgaacccttctgaaattttcttggaagagcgttctgccggggcatcgggttcgagtatcgttgcgtcaatggaaggaacgagaccgatcctggttgaaatccaggcgctcatatcaccgaccagttttggaaacccgcgccgcatggctacaggcattgaccacaacagggtgtcgttaattatggctgtgcttgagaagcgggtgggtcttttgcttcaaaatcaagatgcgtatttaaaggtcgccggcggggtcaaactggatgaaccggcgattgatttggcagtagccgtcagcattgcctcaagcttcagagatacaccgccgaatcccgcagattgctttatcggtgaagtgggtctgacaggagaagtccgcagggtgtcaagaatcgaacagcgcgtaaaagaagcggcaaaactcggcttcaagcgcatgatcatacctgaggcgaatgcagatgggtggacaataccaaaagggattgaggttgtcggagtagcaaatgttgcagaagcgcttcgtacttcattaggaggatcataatagatggaaaaagagaaaaaaggggcgaaacaagagcttgacctgtctgcaattctgcagttcgttgcaccgggcaccccgctcagagccgggatagagaatgtacttcgggcaaatacaggcggcctgattgttgtcggatacaatgataaggtaaagcaagtcgtggatggcggttttcatattaatacatcatttgcgcccgctcacttatacgagctggccaaaatggacggtgccattattttaagtgattccggccagaaaattctttatgcgaatacgcagcttatgccggaggcgaccatttcttcttcagaaacgggaatgaggcaccgtacggcggaacgggtggcgaagcagaccggctgtctcgtcatcgccatttctgagcgcagaaatgtcattacgttatatcaggacagcatgaagtacacactaaaggacataggatttattttaacaaaggcaaatcaggctattcaaacgcttgagaagtataaaaccattttagacaaaacgattacggctttaaacgcattagagtttgaggagcttgttacattcagtgacgtgctgtccgtcatgcatcgatatgaaatggtgctccgaataaaaaatgaaatcaatatgtatattaaagaactcggaacggaaggccacttaatccgtctgcaggtgattgaactgattacggacatggaagaagaggcggcacttttcatcaaagactatgtcaaagaaaaaatcaaagatccgttcgtgctgctaaaagagcttcaggatatgtccagctatgatctgcttgatgattccattctgtttaagctgcttggatatccggcttctaccaatattgatgattatgtgctcccgagaggatacaggctgctgaacaaaattccgcgtctgccgatgccgattgttgaaaatgtggttgaggcgttcggatttttgccaagcataacggaagccactgtagaagagcttgatgatgttgagggtatcggcgaagtgcgcgccaaaaaaatcaaaaaaggcttaaaacgccttcaggaaaaacactatatagatagacagctttaagaatcgcttaaacctgtcggaatccgggtatattattgttagtttttgtttattctgaatttgtaggctctgacagtctgctgaaaaaatgctacttaaaaggaggtggaggtatgttaaaacgaatagttcaggcgttcttcattattgtgggcggcgttgtcggtatctttttaatacctgaattgtttgtgctgtcaaatatacaggacatacctttaataacaaacgcatatacgtctgctgcaattggtgctattatcttttttctcatcagtatatggacgacagaatatgtgattaattgggtaaaatggattgaagattctttgctgagagctccggtgccggatctgttattcgggagtctcggattggtttttggacttatcatcgcatatctcattgtaaacgtgattccgctggacaatattccgtaccgtatattcagcaccatcattccggtctttctggctttctttctcggttatctgggcttccaagtcggatttaagaaaaaggatgaactgatcagtcttttctccatttctgcaagaatgcagaagaaaaagggaagtgctgatgaggagcaggaggaacaggataaaaggctgaaaatcttagatacaagtgttattattgatgggagaattgcagatatttgtcagacgggctttttagaaggcgtcattgtcattcctcaatttgtgctggaggaattacagcatatcgctgattcttcagatgttttaaaacgtaacagaggacgccgcggtctggatatcttgaatcgcattcaaaaggaactggatattacggttgaaatttatgaaggcgacttcgaggacattcaggaggttgacagcaagcttgtcaaacttgcgaagctgacatccggcgtcgttgtgacgaatgattttaatttaaataaagtatgtgagcttcagaaggttgcggtactgaatattaatgaccttgcaaacgcggtgaagccggttgtgcttccgggcgaagagatgaatgtgcaggtgattaaggacgggaaagagcacaatcaaggtgtggcttacttggatgacggtacgatgattgttgtggaagaaggccgcaattatatagggaaacatattgatgtgctcgtaaccagcgtactgcagacagcggcgggacgaatgatttttgccaagcccaagctgcttgagaaagctctttaagagggagttcatatggagtatgttgtcgttattccggctgccggacaaggaaaacggatgaaggccgggaaaaataagctgttcatcagcttaaaaggtgcgcctgttattatacacacactgcgggtttttgaaagccacgcaccctgtcagaaaataatcctggtgataaacgagagtgaacaggaagattttcgccagctgctggcccaatttccgattcagacggaaattgagcttgttaccgggggtgcggagcgtcagaacagtgtatacgaaggactgaaagtgattgataaggaatcggtcgtccttgttcatgacggagcgcgcccgtttgtcacacatcagcatatcgataagctcgttgaaacagcagaggaggcgggagcggctgtcctggctgttcctgtgaaagacacgataaaacgggcggaaggctcccgggttgcggagacctttgatcgttcaagcttgtgggccgttcaaacgccgcaagcttttcgtctttctttattgaagacggcgcatatggaagcggaaaacaaaggcttcttagggacggatgacgccagcctcgtcgagcgtcttgatggatatcaggtgagtatcgttgaaggcagctataccaatattaagctgacaacgccggatgacctgatatttgcggaagcaatcatgaaagcggaaagtgggaatcataatgtttagaatcggacaaggatttgatgtgcatcaattaacggaaggccgtcctctcatcatcggcggaattgaaattccttatgaaaaggggctgctcggacattcagatgctgatgtattgctgcatacagtcgcagacgcgtgtctcggagcggcaggtgaaggagatatcggcaagcatttcccggatactgatccggaattcaaggatgcggattcttttaagctgcttcagcatgtctggaacattgttaaagaaaaaggatacgtactcggaaatatagactgtacgattattgcgcaaaagccgaaaatggcgccgcatattgatgctatgagaaaacggatagcggaaggccttgaggcggacgtctctcaagtaaacgtaaaagcaacgacgacagaaaagctcgggtttaccggaagagccgaaggaattgccgctcaggcgaccgttctgatccaaaaagcctgatcattgttttgatgcccggtctatttggtggtagaatagatacatatattcggctagaggctacagacgagatgaaaggaagtatttgaacatgggaaatgaagtacgcgttcgttatgcaccgagtccgaccggacatttgcatatcggtaacgccagaacagcgctttttaactatttatttgcccgcagccaaggcggaaagtttattatccggattgaggatacggacaaaaagcgaaatattgaaggcggagagcaaagccagctcaactatctgaaatggctcggcatggactgggatgaaagtgttgatgtcggcggagaatacggcccgtaccgccagtctgagcgtaacgacatttacaaaaagtactatgaagagcttcttgaaaaagggcttgcttataaatgtttctgtacggaagaagaacttgagaaagaacgtgaagagcaaatcgcccgcggggaaatgccgcgctattccggcaaacacagaaacctgactcaggaagagcaggagcagtttttagccgaaggcagacagccgagcatccgtttccgcgtgccggaagggaaaatcatcgcatttaacgatatcgtaaaaggtgagatttcttttgaatcagacggcatcggcgactttgtcatcgtcaaaaaagacggaacaccgacgtataactttgctgtcgcgattgacgattacttaatgaaaatgacgcacgtgctccgcggtgaggatcacatttcaaatacaccgaaacagatcatgattttccaggcattcggctgggatgttcctgtcttcggacatatgacgcttattgtaaacgaaagccgcaaaaaattaagtaaacgtgatgaatcaattatccagtttattgagcagtatgatgagctgggttacctgcctgaagcgctgtttaactttatcggacttctcggctggtctcccgtcggtgaagaagagcttttcacaagagaacaattcattgaaatttttgatgtaaatcgtttgtctaagtcaccggctctgtttgatatgcataaactgaaatgggtcaacaaccaatacgtcaaagcgctggatcttgatcaagtggttgagctgaccttgccgcacctgcaaaaagctggaaaagtcggcactgagctttctgccgaggagcaggaatgggttcgtaaattaatctctctttaccatgagcaattgagctacggcgctgaaattgtcgagctgactgatttgttctttaaagatgagatcgagtataatcaagaggcgaaagccgttctggaagaagaacaggtgcctgaagtgctcagcgtatttgctgcgaagcttgaagagcttgaagaatttacgcctgagttgatcaaagcctcaattaaagctgttcagaaagaaacaggccataaaggtaaaaagctgttcatgccgattcgtgtagcggttaccggtcagacacacggtcctgagcttccgcaggccattgagctgatcggcagagaaacagccgtcagacgcctgaaaagcatttaaatatacgattgttgacagggaagagtataaaacaatgaccattacagaaagaatcttcatcggctgagagagattcatgcgtcatgttttagaagtgcgcccttaagacctttgaagaacatttctgcggaaatcagtatttaaaggcggccgccgccgttaccggcttttaagttgggaaaacagtgacttgtttttcaaacagagtggaaccgcgcggtaaaagcgtctctgtcatgtttacatgcagaggcgctttttttataggcggaaaaacagactggagcggggagagaatggggggaagcatgtgttttttaaaatgctaaaagaagacatagatacagtgttcgatcaagatccggcagcaagaagctatttcgaagttgttttaacttattctggtttacatgctatatgggcgcatcggattgcacatgctttatataaacggagttttttcttcctggcgcgcctgatatcacagattgcccgtttctttaccggaattgaaatccatcccggcgcgaccatcgggagaaggtttttcattgaccacggtatgggggtcgtcataggggaaacatgtgaaatcggcaataacgtgacggtattccaaggtgtcactctcgggggaacgggaaaagaaaaggggaagcggcatccgaccataaaagatgatgctttaattgcaaccggagcgaaggtgctcggctctattacggtcgggcagggttctaaagtaggggccggttccgttgtgcttcgtgatgttcccgacttttcgaccgttgtcggcataccggggaaagtcgtcattcagaacggaagaaaaatcaaacgcgatctcaatcaccaagacttgcccgatccggttgctgaccggtttagagcattggagcagcagatttttgaactgcaggctgaactggaagataaaaaagaaaggatcaaccaaaaatgaccattacactttataatacattgacacggaaaaaggaaacattcgttcctcttgaggaaggcaaagtaaaaatgtacgtgtgcggaccgactgtatacaactatattcatatcggaaacgcccgtccggcgattgtgtatgataccgtacgcaactatttagagtataaaggatacgatgttcaatacgtatcgaatttcaccgatgttgacgacaaactgattaaggcggccaacgagctcggcgaggacgtcccggccgtttctgaacggttcattaaagcgtattttgaagacgtgggggccctcggatgccggaaagcggatcttcacccccgggtcatggaaaacatggacgccattattgaatttgtcagcgagctgattaaaaaaggctacgcttatgaatcagaaggcgacgtctatttcaaaacaagggccttcgaagggtacggcaagctatctcagcaatcaattgatgaactcagatcaggcgcgcgtatccgtgtcggcgagaagaaagaggatgcgctggactttgctctttggaaagctgctaaggacggagaaatttcatgggatagcccttggggaaaaggccgcccaggctggcatattgaatgctccgcaatggtgaaaaagtatttgggtgacgaaatcgatattcatgccggcggtcaggacctgacattcccgcaccatgaaaacgaaatcgcccaatctgaagcattaacaggcaagacattcgcaaaatactggcttcacaacggatatatcaatatcgataatgagaagatgtcaaaatctctcggcaactttgttttggtgcacgatatcattaagcaatatgacccgcagcttttgagatttttcatgctgtccgttcattaccgccacccgatcaactattcggaagagctgcttgagaaaacaaaaaacgcgtttaaccgcctgaagacggcctatagtaatttaaaccatcgtttgattagcagcacgaatctgactgacaatgatgaggaatggctcgctaaaatcgaagagcaccgcactgcgtttgaagaagcaatggatgatgattttaatacggcgaatgcgatttccgtttggtttgatctggcgaagctcgccaattactacatgcaggaagacaatacggcggatcacgtcattaaagcctttatcagcatgtttgacagaatcggatctgttctcggacttacgctcggcgaagaagagcttgtcgacgaagagattgaagagttgattgagaagagaaatgaagcccgccgcaatcgtgattttgctttgtcagaccagattcgcgatcagctgaaaagcatgaatatcattcttgaagatacggcccagggaactcgctggaagcggggagagtaagcggatgcttcaatttgaacaaatcaaagattcaaagcagttaaacggtcttgcgcttgcttatatgggtgatgccatttttgaaatatacgtccggcatcacctgcttaagcagggctttacgaaaccgaatgaccttcataagaaggcgagccggattgtatcggcaaaatcacaggcagacatattgttccgccttcaggacgaatcctttttcacggaggaagaggaagccgtgctgagaagaggcagaaacgcgaaatcagggacgacgcctaaaaacacagatgtacagacgtaccgccatagtacagcttttgaggctttactcggatacctttttcttgagaaaagagaagaaagactgaatcagctgattgctgaggctatacaagtcgggacgtcagggaggaaaacaaatgagtcagcaacatgattacgtcataggaaaaaacgctgtgattgagacgttaaagtcagatcgcaagctgtataagttatggatggcggaaaacacagtaaaaggacaggcgcagcaagttatggagcttgctaaaaagcgcggcgtcaccattcaatttgtaccgaggaaaaaactcgatcagatggtggaggggcagcatcagggtgttgtcgcccaggtggcagcatatgaatatgcacaattagacgaattatataaaagagcggaagagagaaacgaacagcctttctttctcatactggacgagctggaagaccctcataatctcggttccatcatgagaacggctgacgctgtcggtgcacacggcatcgtgattccgaaacgcagagcggtcggactgacttcgacagtcgcaaaagcttcgaccggtgcgattgaacacattcccgtcgtgaaggtgaccaaccttgcccggacacttgatgaaatgaaggagcgggggatttgggtcgtcggaacggatgcatccgcccgggaagactaccgctctatggacggcaagatgcctttggcgctcgttatcggaagcgaaggcagaggaatgggccggcttgtgaaagagaaatgtgattttctcattaagcttccgatggccggaaaagtcacgtctttgaatgcgtcggttgcggccggccttctcatgtatgaagtctaccggaagcgcaatcctttaggggaatgaagacagatggacatcctgttagtagacggatacaacatgattggagcttggccgcagctaaaggatttaaaagcgaacagttttgaagaagcgagagatgtactgatccagaagatggcggaatatcagtcctacacgggaatcagagtcattgtggtgtttgacgcacacctggtaaaaggcatagagaaaaaacaaacgaatcacagagtcgaagtgattttcacacgggagaatgaaacggcggatgagcggatcgagaagcttgcccaggcgctgaataatattgcgacacagattcatgtcgcaacctccgattatacggagcagtgggcgattttcggacaaggggctctccgtaaatccgcccgggagctcctgagggaagtggatacgatagaacgccggattcaaaggcgggtttcaaagatcacttctgaaaaaccaccgggtaaaatcgagctgtccgaagaggttttgaaaacgtttgaaaagtggcgccgaggcggtctggattaggttgacgctttttcgcccattaatgtataatatttctatctacgtgcgccggggggatcgcagtgaatctacagaacagcaagggaaagttcaacaaagtgcaattttgccagttggaggacgagcaggtcattgaaaaggttcatgttggggatagtgatgcgttagattacttgattacgaagtaccgtaattttgtacgggcgaaagcaaggtcttattttttaataggggccgacagagaagatattgtacaggaagggatgataggcttatataagtctatccgagactttagagaggacaagcttacttcatttaaagcttttgcagaattatgcattacccgccagattattaccgcaataaagacagctacccgtcagaaacacattcctttaaattcctatgtttctttagacaaacctatttttgatgaagaatctgacagaacactgcttgatgtcatttcaggcgctaaaacgttaaatcctgaagagatgattattaatcaggaagaatttgatgatatcgaaatgaaaatgggagaactgctgagcgatctggagagaaaggtgcttgttttgtacttggatggaagaagttaccaagagatttcagatgacttaaaccgacacgtaaaatcaatcgataatgccctgcagcgcgtgaagcgcaagcttgaaaaatatttagaaataagagagatcagcctgtagcaggtttctgtgtcatattgacagaatttttctgactgtgctattttattaagataaatgaatgtttaggaaaaggtgtaacgacatgagaaaaaagattacgctggcatgcaaaacatgcggaaatcgtaattatacgacaatgaaaagctctgcatcagcggctgagcggttagaagttaagaagtactgcagcacttgcaattcacatacagctcatttagaaacaaaatagtgttcgctttttaaattgtggaggtcttttacatgcgcatgatgagtttctttaaagatgttgggaaagaaatgaaaaaggttagctggcctaaaggcaaagagttaacgcgctatacaatcacggtgatttcaacggttatcttttttgttatcttttttgccctccttgatacaggaatttctcaattaattcgtttaatagttgaataatgatcagcaatacgtgctataatagatcataatatcgtttgccaaaacccgttcagcgggttttttattgtgttgttgaaaaaggattcataggccctgagcctattttttgttttacacttcatttttaaatgcggggagggaaggactgcagagtcctgatagaatggaaaagaattggtatgttgttcatacgtattccggttatgaaaacaaagtaaaagcaaaccttgaaaaacgtgtggaatcaatgggaatgcaggataaaattttccgcgttgtcgtccctgaagaagaagagactgatattaagaacggcaagaaaaaagtagtcaaaaagaaagtgttcccgggttatgtgcttgttgaaatcgtcatgactgatgattcctggtatgtggtccgcaacacgccgggcgttaccggattcgtcggatcagccggttcaggctcaaagccgactccgcttcttcctggcgaagcggaaaccatcttaaaacgtatgggcatggatgagcggaaaaccgacattgattttgaattgaatgagacagtcaaagtcatagacggacctttcgccaactttacaggatcaattgaagagattgattatgataagagcaaagtgaaagtattcgttaacatgttcggccgtgaaacgccggttgaactggaatttacccagatcgacaaattgtaatgtgaaaaaacttgaaattgctatatattaatgataatatagcaaaggtacgtcttggactaatccaaggcagctagcttgatatttcgtcattcatataaagaatgaaaccttgagtgggagggtttaccctattaccacatcacggacttaaggaggtgtgtctcgtggctaaaaaagtagtaaaagttgtaaaattgcaaattcctgctggaaaagctaacccagcgccgccagttggacctgcactaggtcaagccggtgtaaatatcatgggattctgtaaggagtttaacgctcgtacagctgaccaagctggtttaatcattcctgttgaaatttcggtttacgaagaccgttcatttacatttattacaaaaactccgcctgctgcagtattgcttaaaaaagcagctggaattgagtctggttctggtgaaccaaaccgtaataaagtggcaaccgttaagcgcgataaggttcgcgaaatcgctgaaacgaaaatgcctgacttaaacgcagcagacgttgaagcggcaatgcgcatggttgaaggtactgcccgcagtatgggtatcgttatcgaggattaatttgtttcttgtcgggttgcgagttttcacaagttcgcaacccttattcgtgggaggttattccgctataaccacataaggaggaaattttaaaatggctaaaaaaggtaaaaagtacgttgaagctgcgaagcttgtagaccgtgcgaaagcttacgacgtcgctgaagcagtggcgcttactaaaaaaacaaacacagctaaattcgacgctacagttgaagttgcttttcgtttaggggttgaccctcgtaaaaacgatcagcaaatccgcggtgcagttgtacttcctaacggaactggtaaaactcagcgcgtgcttgtattcgctaaaggcgaaaaagcaaaagaagctgaagctgccggtgcagactacgttggcgattctgattacatcgcgaaaatccagcaaggctggttcgaattcgatgtaatcgttgcgactcctgacatgatgggtgaagtcggtaaaatcggccgtgtgcttggaccaaaaggtcttatgccaaaccctaaaacaggaactgttacattcgaagtagaaaaagcaatcggcgaaatcaaagctggtaaagtagaataccgcgttgacaaagctggtaacatccatgttccgatcggaaaagtttctttcgaggatgaaaaacttgttgagaacttcacaacaatgtatgatacaatcctgaaagcaaaaccggctgcggctaaaggtgtttacgtgaaaaacgttgccgttacttctactatgggccctggtgtcaaagtagacgcttctactttcaacgtaaaataatatttgactttagatcagcattctgatatgattcaaaatgttgtaaaatataatatgtcatttataccgtagacagcaggggccgttaaggcttaatatcctgccgaggtgtatatatatcacagctattacgttacgtatgcttgtatatacagcctccatgtccacatggaggctttttatatgaaatcgtcgtcacagtcgtgatcacctagcggtataagtgttacacaaaatctacaggaggtgtaaccatgagcagcgcaattgatacaaaaaaagttgttgttgaagagattgcttctaaactgaaagaaagcaaatcaacgatcatcgttgactaccgcggacttaacgtttctgaagtaactgaactccgtaaacagcttcgcgaagctaacgtagagttcaaagtgtacaaaaacacaatgactcgccgtgcggttgaacaagctgaacttgatggtttgaatgatgtcttaactggaccgaatgcgatcgcattcagtactgaagatgttatcgctccggcaaaagttcttaacgagttcgcgaaaaaccacgaagctctggaaatcaaagcgggcgttatcgaaggaaaagtatcttctgttgaagaagtgaaagctcttgctgaacttccttcacgcgatggcttactttctatgttgcttagcgtacttcaagctccagttcgcaaccttgcacttgcagctaaagcagttgcagaccaaaaggaagaacaaggcgcttaatctgattttaccctaaaataaaacaaatggaggaatttcaaatggctttaaatatcgaagaaatcattgcttccgttaaagaagcaactgtacttgaattgaacgacctagtaaaagcaatcgaagaagaatttggcgtaactgctgctgctcctgtagctgtagctggcggagctgctgctggcggcgctgctgaagagcaaagcgaattcgaccttatccttgctggtgcaggttctcagaaaatcaaagttatcaaagttgttcgtgaaatcactggtcttggcttgaaagaagctaaagaacttgttgacaacactccaaaaccacttaaagaaggtattgcgaaagaagaagctgaagagcttaaagctaaacttgaagaagttggcgcttctgtagaagttaagtaatcttcacttgcctgtaggggaagctcgcttttatgaggcgggctttttctttgcttttctttaagtgccattaaaaaaggaggttctaataatgagtgaacactattattcagaaaaaccttcagttaaaagcgataaacagacatggtcatttacactgcggaacagatcttatacattcacaagtgacagcggcgttttctcgaaaaaggaagttgatttcggttcgcgtgtcttaattgaagcgtttgaagagccggagatcgatggtgacttcctggatgcaggctgcggttacggcccgatcggtctgtcgctcgccggtgcatttacagaccggaccgtgcacatgattgacgtgaatgaaagagccgtagagctgtcaaatgaaaatgcagaaaaaaacggaataaaaaacgttcagatttatcagagtgatttattttcaaatattgattctgctcaaacatttgcttctatttttacaaaccccccaatccgcgccggaaaaaaagttgtccatgccatttttgaaaaaagcgctgagcatttaagggcttcaggtgaattgtggatcgttatacagaaaaaacagggcgggccttctgccattgaaaaactgaaggagctttttgacgaagtttctgtggttcaaaaaaagaaaggctattatatcataaaagcaaaaaaagtttgacttgaattttcagctatgttaatattgtaaaatgccaatgtatatattttgcatgatatgctgaaataatcatagtgcatgtataaattatacaaacatggaaatgctaataaaatcggtatttgtttttggatgtggttttcttaattagaaacccttttttcttttgtcttgtaaaagtatttctttatcgtaagagatgcttattacacatataatacgcatgatttgaggggtgaatcagttgacaggtcaactagttcagtatggacgacaccgccagcgcagaagctatgctcgcattagcgaagtgttagaattaccaaatctcattgaaattcaaacctcttcttatcagtggtttcttgatgagggtcttagagagatgtttcaagacatatcaccaattgaggatttcactggtaacctctctctagagttcattgactacagtttaggagatcctaagtatcccgttgaagagtcaaaagaacgtgatgtgacttactcagctccgctgagagtgaaggttcgtttaattaacaaagaaactggagaggtaaaagaccaggatgtcttcatgggtgatttccctattatgacagataccggtacttttatcatcaacggtgcagaacgtgttatcgtatctcagcttgttcggtctccaagtgtatatttcagtggtaaagtagacaaaaacggtaaaaaaggttttaccgcgactgtcattccaaaccgtggcgcatggttagaatacgaaactgatgcgaaagatgttgtgtatgtccgcattgatcgcacacgtaagttgccggttacggttcttttgcgtgctctcggcttcggttccgaccaagagattctcgatctcattggtgagaacgaatatctccgcaatacactggataaggacaacactgaaaacagtgacaaagcgcttcttgaaatctatgagcgccttcgtcccggagagccgcctacagtagaaaacgcaaaaagcttgctggattcccgtttcttcgatccgaagcgatacgaccttgcgaatgtaggacgctataaaattaataaaaagcttcatatcaagaaccgcctgtttaaccagcgccttgcagaaacactggtggatccggaaaccggtgaaattctcgctgaaaaagggcagattcttgacagaagaacacttgataaagtattgccatacttagaaaatggaatcggcttcagaaaactttatcctaacggcggcgttgtcgaggatgaagtgatgcttcaatccattaaaatctatgctcctaccgatgcagaaggagagcagacgatcaatgtgatcggcaatgcttacatcgaagaagcgattaaaaacattacgcctgctgatattatttcttctatcagctacttcttcaacctcctgcacggagtgggcgacactgatgatatcgaccatctcggaaaccgccgtctgcgttctgtaggtgagctcctgcaaaaccaattccgtatcggtttaagccggatggaacgtgtcgtacgtgaaagaatgtctattcaagacacgaatacaattacgccgcagcagctgattaacatcagacctgttattgcgtctattaaagagttcttcggaagctcacagctttctcaattcatggatcagacgaacccgcttgctgaattgacgcacaaacgccgtctgtcagctctcggaccgggcggtttgacacgtgagcgcgcaggtatggaagtacgtgacgttcactactctcactatggccgtatgtgtccgattgaaacgcctgagggcccgaacatcggtttgatcaactcattgtcatcatttgcgaaagtaaaccgctttggtttcattgagacgccataccgccgcgttgatcctgaaacaggaaaagtaacgcctagaatcgactacctgactgctgatgaagaggataactatgtcgtagcccaagcgaatgctaagctgagcgatgacggttctttcttggatgacagcatcgtagcgcgtttcagaggggaaaacaccgttgtagcccgcaaccgcgtggattacatggacgtttctcctaaacaggttgtttctgctgcgacagcatgtattccgttcttggaaaacgatgactcgaaccgcgccctcatgggagcgaacatgcagcgtcaggctgtgcctttgatgcagccggaagctccgatcgtcggaacgggtatggaatacgtatccggtaaagactccggtgcagccgttatttgtaaacaccctggtatcgttgaacgggtggaagcgaaaaacgtatgggtgcgccgctatgaagaaattgacggccaaaaagtaaaaggcaacctggataagtacagcttgctgaaatttgtccgctccaaccaaggtacgtgctacaaccagcgcccgatcgtcagtgtcggcgatgaagtagtcaaaggagaaatccttgctgacggaccttcaatggagcttggcgaacttgctctcggccgcaacgtaatggtcggcttcatgacatgggatggttataactatgaggatgccatcatcatgagtgaacgccttgtgaaagatgatgtatacacatctattcacattgaagaatatgaatcagaagcacgtgatacaaagcttgggcctgaagagatcacccgcgatattccaaacgtaggggaagacgcgcttcgcaatcttgatgaccgcggaattatccgtatcggtgcggaagtcaacgacggagaccttctcgtaggtaaagtaacgcctaaaggtgtaactgagcttacggctgaagaacgccttctgcatgcgatctttggagaaaaagcgcgtgaagtccgtgatacttctctccgtgtgcctcacggcggcggcggaattatccacgacgtaaaagtcttcaaccgtgaagacggcgacgaacttcctccgggagtgaaccagcttgtacgcgtatatatcgttcagaaacgtaagatttctgaaggtgataaaatggccggacgtcacggaaacaaaggggttatctcgaagattcttcctgaagaagatatgccttaccttcctgacggcacgccgatcgatatcatgcttaacccgctgggtgtaccatcacgtatgaatatcggtcaggtattagaacttcacatgggtatggctgcccgctacctcggcattcacatcgcgtcacctgtatttgacggcgcgcgtgaagaagatgtgtgggaaacacttgaagaagcaggcatgtcaagagacgctaaaacagttctttatgacggccgtacgggagaaccgtttgacaaccgtgtatctgtcggaatcatgtacatgatcaaactggcgcacatggttgatgataaacttcatgcccgttctacaggtccttactcacttgttacgcagcagcctctcggcggtaaagcccaattcggcggacagcgtttcggtgagatggaggtttgggcgctcgaagcttacggcgcagcttacacgcttcaagaaatcctgactgtgaagtccgatgacgtggtcggacgtgtgaaaacatatgaagccatcgtcaaaggcgacaatgttccagagcctggtgttccggaatcattcaaagtattgatcaaagagcttcaaagcttaggtatggacgtaaaaatcctttcaggcgatgaagaagaaatagaaatgagagatctagaagacgaggaagatgcgaaacaagctgacggccttgcattatcaggtgatgaagcgccggaagaaacagcatctccagacgttgaacgtgacgcagtaacgaaagaatagtctctgattgataaaggcaagtgacatcggttaatccgaagataaaaagggaggtaggccccttgctagatgtgaacaattttgagtatatgaacatcggtcttgcttcaccggataaaatccgttcatggtcttttggtgaagtgaaaaagcctgaaacgataaactatcgtacattgaaacctgaaaaggacggcctgttctgcgaacgcattttcggaccgactaaggactgggaatgtcattgcggcaagtacaagcgggttcgttataaaggcgtagtttgtgaccgttgcggagttgaagtaacgcgggctaaagtccgtcgtgagagaatggggcatattgaactggctgccccggtttctcacatttggtatttcaaaggtattccgagccgtatgggtcttgtattggatatgtcaccgcgtgcgctggaagaagttatttactttgcttcttacgtcgtaactgacccggccaatacaccgctcgaaaagaaacagcttttatctgaaaaggaataccgtgcgtatctggataagtacggaaacaaattccaagcctctatgggcgcggaagccattaataaacttctgcaggacatcgaccttgtcaaagaagttgatatgttaaaagaagagctgaagacttctcaagggcagcgccgtacacgtgcgatcaaacgccttgaagtgcttgaagccttccgtaattcaggaaacaagccgtcttggatgatcctcgacgtgcttccggttattccgcctgaattaagaccgatggttcagcttgacggcggacgtttcgcaacgtctgacctgaacgacctttaccgtcgtgtcatcaaccgtaataaccgtttaaaacgtctgttagacctcggcgcgccaagcatcatcgttcagaacgaaaaacgtatgcttcaggaagcagtcgacgctctgattgacaacggacgccgcggccgtccggttaccggaccgggtaaccgtccgcttaaatctctttctcacatgctgaaagggaaacaagggcgtttccgtcagaaccttctcggtaaacgtgtagactactcaggacgttccgttatcgtcgtaggtccgcatctgaaaatgtatcagtgcggtttgccgaaggaaatggcgcttgagctcttcaagcctttcgtcatgaaagagcttgttgaaaaaggccttgctcacaatatcaagagcgcaaaacgcaaaatcgaacgcgtgcagcctgaagtatgggatgtacttgaatctgtcattaaggagcatccggtcttactgaaccgtgcccctactcttcacagattaggtatccaggctttcgaaccgacgcttgttgaaggacgcgccatccgtcttcacccgttagtatgtacagcttataacgctgactttgacggtgaccaaatggcggttcacgtacctttatcagctgaggctcaagctgaggcgcgcattctgatgcttgcggcccaaaacatcttgaaccctaaagatggtaaaccggttgttacgccgtctcaggatatggtattaggaaactactacctgacgcttgagcgcgccggagcagtcggcgagggtatggttttcaaaaatacggacgaagcgcttcttgcttatcaaaacggttatgttcaccttcatacgagagtagctgttgcagcgaactcccttaagaatgtgacatttactgaagaacagcgttcaaaattgttaattacaactgtcggtaagctcgtcttcaatgaaattcttccggaatcattcccttacatgaatgaaccaacgaagagcaatattgaagagaagacacctgaccgtttcttcttagacaaaggtgctgacgtaaaagctgtgattgctgagcagccgatcaacgcaccgtttaaaaaaggtattctcggtaaaatcatcgcggaaatctttaaacgattccatatcacggaaacgtctaaaatgcttgaccgcatgaaaaacctcggtttcagatattcaacgaaagccggcatcacagtaggggtttctgatatcgtcgttctcgatgataaacaggaaatccttgaagaagcacaaagcaaagttgataatgtcctgaaacagttcagacgcggtttaatcaccgaagaagaacgttatgaaagagtcatttcaatttggagttcagcgaaagatgttatccaaggcaaactgatgaaatcattagacgaagtcaacccgatctacatgatgagtgactcaggagcccgtggtaacgcatctaactttacacagcttgcgggtatgcgaggtctgatggccaacccggctggacgaatcattgaattgccgattaaatcaagtttccgtgaaggtctgacagtattggagtactttatctccactcacggtgcgcgtaaaggtcttgccgataccgccctgaaaacagctgactcaggttaccttacacgccgtcttgttgatgttgcgcaggatgttatcattcgtgaaacagattgcggaacagaccgcggtattcttgcaaaaccgctcaaagaaggcacggaaatcatcgagcgcctggaagagcgtctgatcggacgtttcgccagaaaacagatcaaacatcctgaaacgggtgctgtgctcattaacgaaaatgaattgatcgatgaagataaagcgctggaaatcgttgaagccggaatcgaagaagtgtggatccgttccgcgttcacatgtaacactcctcatggtgtatgtaaacgatgctacggacgtaaccttgcaaccggaactgatgttgaagtcggcgaagcagtaggtattatcgccgctcaatctatcggtgagcctggaacacagttaacaatgcgtacgttccacacaggcggggttgccggagacgatatcacacaaggtcttccgcgtatccaagagcttttcgaagcgcgtaatccgaaaggtcaagcgacgatttctgagattgacggtacaattgccgaaatcaatgaagtccgcgacaaacagcaggagattgttgttcagggcgctgttgagacacgttcatacacggcaccttacaactcacgcctgaaagtggctgagggtgatcagattacccgcggtcaagtgctgacagaaggttctatcgatccgaaagaacttcttaaagtcactgacctgacaacggttcaggaatatcttctgcatgaggttcagaaggtttaccgtatgcagggggttgaaatcggcgataaacacgtagaagtaatggttcgccagatgcttcgcaaagtccgtgtgatcgatgccggagatactgatgttctccctggcacattgcttgatattcaccaattcacagaagcgaacaaaaaagtgctgcttgaaggcaatcgacctgctacaggccgtcctgtccttctcggtatcacaaaagcttcactcgagacggattcattcttgtctgccgcatcattccaagaaacaacacgcgttcttacagatgctgcgattaaaggcaagcgcgatgaacttctcggcctgaaagagaatgttatcatcggtaaactggttccggccggtaccggtatgatgaattacagaaaagtaaaacctgtttcaaacgttcagccttcggaagatatggttccggctgaataatagaaactgctgcaggaaaggctgtttcgacagcttttcctcagtattacaattattctggcgggggactgcactaaaaaatgtcatacgttgttgacatccgtcccgcagagtgataatataaccaaggtgctcgaaataaaacctgttactttggaggatatgtttatgtcttatgataaagtatcacaggccaaatcaattattattggtacgaagcaaacagtgaaagctctaaaacgaggttcagtgaaggaagtcgtcgtggcaaaagacgcggattcagttcttacggctggcgttatccagcttgcaaagaaccaaaataccgctgtctgtatggtggattccatgaaaaagctcggcaaagcctgcggaattgaagtgggagcagcagctgttgccattatgttatagcgtactttttgtttttatataagatatcattcttgtgtaaagacattgttttttgcctaatgatgaaccacctgggtatgtgggttataaaacgtaatgaagggaggaacacaacatgcctacaattaatcagctaattcgcaagggacgcgtgagcaaagttgaaaactctaagtcacctgcactaaacaaaggatacaacagctttaaaaaagagcacactaacgtatcttctccacaaaaacgcggggtatgtactcgtgtgggtacaatgacaccgaaaaaaccgaactcagcacttcgtaaatatgctcgtgttcgtttgactaacggaatcgaggttactgcctacattcctggtatcggtcacaacctgcaagagcacagcgttgtactgatccgcggcggacgtgtaaaagacttaccgggggtacgctaccacatcgttcgtggcgcgcttgatactgccggagttgaaaaccgtgcgcaaggccgttctaaatacggtacgaaacgtcctaaagcaaagtaatcaaataaatcattaaaactatgaagggaggatattcagatgccacgtaaaggtcctgtagcaaaaagagatgttttacctgatccgctttacaactctaagctggtatcccgcctgatcaacaaaatgatgatcgacggtaaaaaaggtaaatctcaaacaatcctatacaagtcattcgatatcattaaagaacgcactggcaatgatgcaatggaggttttcgaacaagcattgaaaaacatcatgcctgtacttgaagtaaaagcacgccgtgtaggtggagctaactaccaagtgcctgtagaagttcgtcctgaacgccgtacaactcttggtcttcgctggttggttaactatgcgcgtcttcgcggagaaaaaacaatggaagagcgcctggctaacgaaattcttgatgcagctaacaacactggtgctgccgttaagaaacgtgaagacactcacaagatggcagaagcgaacaaagcatttgctcactaccgctggtaggattcatataatcaaaataataattccctaataaggaaggagaaattacccaatggcaagagagttctccttagaaaaaactcgtaatatcgggatcatggctcacatcgatgccggtaaaacgactactacagaacggatcttgttctacacaggccgtatccacaaaattggcgaaactcacgaaggtgcttcgcaaatggactggatggagcaggaacaagaacgcggtatcacaatcacttctgcagcaacgactgcacagtggaaaggttaccgtgtaaacatcatcgatacaccgggacacgtagacttcacagttgaagttgaacgttcactccgtgtacttgatggtgcggttgccgtacttgatgctcaatcaggtgttgagcctcagacagaaacagtatggcgccaagcaacaacttacggagtaccgcgtgttgtatttgtcaacaaaatggacaaaatcggcgcagacttcctttactctgtaggcactttaagagaccgtcttcaagctaacgctcatgcaattcaattgccgatcggcgctgaagacaacttcgaaggtatcatcgacttagtagaaaacgttgcgtatttctacgaagatgaccttggaactcgttcagatgcgaaagaaatccctgaagagtacaaagaacaagctgaagagcttcgcagcagcctgattgaagctgtagctgagcttgatgaagagcttatggaaaagtaccttgaaggtgaagaaatcactatccctgaactgaaagctgctatccgtaaaggtacactgaatgttgaattctaccctgtacttgttggttctgctttcaaaaacaaaggtgttcagcttgtacttgatgctgttcttgactaccttcctgcgccaactgatgttgctgcaatcaaaggtgtacgtcctgatacagatgaagagatcgttcgtcattcttctgatgaagagccattctctgcacttgcatttaaagttatgactgacccttatgtcggtaagctgacattcttccgcgtatattccggtacacttgattccggttcatatgtaaagaactctacaaaaggcaagcgtgagcgcgtaggacgtatccttcaaatgcacgctaacagccgtgaagagatctctactgtatacgctggagacatcgcagctgctgtaggtctaaaagatacttctactggagatactctatgtgatgagaaggatcttgtaatccttgaatcaatggaattcccagagcctgttatcgacgtagcgattgagcctaaatcaaaagctgaccaagataaaatgggtatcgctttagctaaacttgctgaagaagatcctacattccgtacacaaactaaccctgaaacgggtcaaacaatcatctctggtatgggtgagcttcaccttgatatcattgttgatcgtatgaagcgtgagttcaaagttgaagctaacgttggtgctcctcaagttgcgtaccgtgagacattccgtaccggtgcaaaagttgaaggtaaattcgtacgtcaatcaggcggacgcggtcagttcggtcacgtttggatcgaatttgaaccgaacgaagaaggcgctggctttgaattcgaaaacgcaatcgtcggtggtgttgttcctcgtgaatacatcccagccgtacaagcaggtcttgaagactctcttgaaaatggtgtcctagccggattcccgctaatcgacatcaaggcgaaactttttgatggatcttaccatgatgttgactcaaacgaaatggcgtttaaagtcgctgcttctatggcattgaaaaatgcagtcagcaaatgtaacccagttcttcttgaaccaatcatgaaagttgaagttgttattcctgaagaatacatgggagacatcatgggtgatgttacttctcgtcgcggacgcgtagaaggtatggaagctcgcggtaacgctcaagttgtgcgtgcgatggtacctcttgctgaaatgttcggttacgctactgcccttcgttctaacacgcaaggacgcggtacgttcacaatgttcatggatcactacgaagaagtgccgaagagcatcgctgaagaaattatcaaaaaaaataaaggcgaataattgattttgccacttaactcaagtataactactattgtaagatgaggaagtgagagcttgctttcactttctatcactctatacattactaattaaaagctcttaaggaggattttagaatggctaaagaaaaattcgaccgttccaaatcacatgccaatatcggtacaattggacacgttgaccatggtaaaacaacattaactgctgctatctcaacagtacttcataagaaatctggtaaaggtacagctatggcgtacgatcaaattgatggtgctccagaagaacgtgagcgcggtatcacaatctctactgcacacgttgagtacgaaactgacactcgtcactatgcacacgttgactgcccaggacacgctgactatgttaaaaacatgatcactggtgctgcgcaaatggacggagctatccttgtagtatctgctgctgatggcccaatgccacaaactcgtgagcacatccttctttctaaaaacgttggtgtaccatacatcgtagtattccttaacaaatgcgacatggtagacgacgaagagcttcttgagcttgttgaaatggaagttcgcgatcttcttagcgaatacgacttccctggtgatgatgtaccagttgttaaaggttctgctcttaaagctcttgaaggtgacgctgagtacgaagaaaaaattcttgaacttatggctgcagttgatgagtacatcccaactccagaacgcgacactgacaaaccattcatgatgccagttgaggacgtattctcaatcactggtcgtggtacagttgctactggccgtgtagaacgcggacaagttaaagtcggtgacgaagttgaaatcatcggtcttcaagaagaaaacagcaaaacaactgttacaggtgttgaaatgttccgtaagcttcttgactatgctgaagctggagacaacatcggtgcacttcttcgcggtgtagctcgtgaagacatccaacgtggacaagtacttgctaaaccaggtacaatcactccacacagcaaattcaaagctgaagtttacgttctttctaaagaagagggtggacgtcatactccattcttctctaactaccgtcctcagttttacttccgtacaactgacgtaactggtatcatcaatcttccagaaggcgtagaaatggttatgcctggagataacactgaaatgatcgttgaacttatctctacaatcgctatcgaagaaggaactcgtttctctattcgtgaaggcggacgtacagttggttcaggtgttgtttctacaatcactgagtaatcgactcgttcattaatgcggggtcccttatggggcctcgtttttttgtttccccgctgattacatgtataatagaacttatacaaattttaggagcagagcgatgaacgataacttcaagaaaaccaatcgtatttcaatgcttcagcaattgctgattaatggcagtgaacaaaccattatgattaatggtgatgacaggagtaatccgctgcttttgtttttacacggcggtcccggcacgcctcaaatcggctatgcgagaaaataccagaataagctggaaaagcatttcaccgttgtgaactgggatcagagaggggcgggtctctcttattcaaaggaaattccgggttcatctatgactttggatcagctgacagccgataccattcatttgaccgaacgcttatgcaagcaattcagcaggcaaaaaatatatatcgccggctattcgtggggttcagttctggcgcttcctgttcttcaagagagacctgatttgtattatgggtatatcggtatcagtcaggtggttaatattcaaaaggaagaaacggaagcttaccggctgatgatggaatggagcaggcaacggaaacatttcctgctggaaaagacgctgcgctttatcggagcgcctccatgggagaaacagctgcagcgaacgttgtttctgctttgtatcgagatgaggggagggggctttacccatcatccgatcggtgctcttaaagcaggggggcgaatgctgtttggtgaaccgtacggtgtgagagggagcttcttagccgcgcggggacaaatgttcagcctgaaacacctgtgggaggatctcattttctttgatgccggggaatcagtttcttctattataataccgtgctgttttatgtcagggagatacgatttgacggtcccagggacgacgtcttatgaatattatcagaaggttgatgcgccgtataaagaatggcattggtttgagaactcagcccattcgcctcacttggaggagccggatcgctttgccgaagttgtcagccggttcgcatcgttccatctctgaaagaaaacaggcatatccttgattaatcatggtatcacctgtataataatcaaagtgtgaaaaccacaaggttctttaaataaaccttgcaacatgcgtctattttctgtataatagtgtatgttggtctttgactgcgatgaagtgagaggttgctgacacacccggccgctttgccatggcaaggtgatcaggtttttctcacggagaactgtctaacgtgatgtaggcgaaaaggagggaaaataatggcaaaacaaaaaattcgtattcgtttaaaagcatatgatcatagaatccttgatcaatctgcagagaagattgttgaaacggcaaaacgttctggtgccagcgtatctggtccgattccgttgccaactgaaaaatcagtttacacaatccttcgtgcggtgcacaaatacaaagattctcgtgagcaatttgaaatgcgtacacataaacgtttaatcgacattgtgaacccaacaccacaaactgttgatgctctcatgcgattagacttaccatctggtgtcgatatcgaaatcaaactttaattctaaaatatagaatgatcttaataggaggtgtgacgaatgaccaaaggaatcttaggaagaaaaattggtatgacgcaagtattcgcagagaacggtgatcttatcccggtaactgttattgaagcagctccaaacgttgttcttcaaaagaaaacagctgaaaacgatggctatgaagcgatccagcttggttttgacgataagcgtgaaaagctttcaaacaaaccggaaaaaggacacgttgcaaaagcggaaactgctcctaagcgcttcgttaaagaattacgcggcgtggatatggatgcgtatgaaattggtcaggaagtcaaggttgaaattttctctgcaggagaaatcgtagatgtaacaggagtatctaaaggtaaaggtttccaaggtgcaatcaagcgccacggacaatctcgcggacctatgtctcacggttcacgctaccaccgtcgtcctggttcaatgggacctgtagatcctaaccgtgtattcaaaggtaaactattacctggacgcatgggcggagatcaaatcactgtccaaaaccttgaaatcgtaaaagtagatgctgagcgcaatcttcttttgattaaaggtaacgtacctggtgcgagaaaaactttaatcactgttaaaagtgctgttaaatctaaataagtctcttaggaaaggaggaaattgatcatgccaaaagtagcattatacaaccaaaacggttctactgctggtgatatcgaattaaacgcgtctgtatttggaattgagccaaatgagagcgtagtattcgacgctattcttatgcaaagagcttccttacgtcaaggatctcacaaagtaaaaaatcgttctgaagtacgcggcggaggtcgcaaaccatggcgtcaaaaaggtacaggtcgtgcccgtcaaggttcaatccgttcaccgcaatggcgcggaggtggtgtcgtattcggcccaacaccacgcagctattcttacaaattacctaaaaaagttcgccgcttggcaatcaaatcagtattgtcttctaaagtgaacgacaacaacattattgttcttgaagatcttactcttgatacggttaaaacaaaagaaatggcagctatccttaaaggattatctgttgagaaaaaagctttaatcgtaactgcggatgcaaacgaagcagtatctctttctgcacgcaacatccctggagttacagttgttcaagctaacggaatcaacgtgttagacgttgtcaaccacgagaagcttctgattacaaaagctgcggttgaaaaagtagaggaggtgcttgcataatgaaagatcctcgtgatgttcttaagcgccccgtcattactgaacgttctgctgatttaatgactgaaaaaaaatatacttttgaagttgatgtaagagctaacaaaacagaagtgaaagatgcagttgaaagtatctttggagtgaaagttgacaaagtcaacatcatgaactacaaagggaaatcaaaacgtgtcggccgctacactggtatgactagccgtcgcagaaaagcgatcgtaaaacttactgcagacagcaaagaaatcgaaatttttgaagcttaattatctgtaaaaagaaggagggaaattcaaaatggcgattaaaaagtataaaccgacctctaacggacgtcgtggcatgacaacttcagattttgctgaaatcacgactgaccagccggaaaaatccttgcttgcgccccttcacaaaaaaggcggacgtaacaaccaaggtaaattgactgtacgtcaccaaggtggcggacacaaacgccaataccgtgttatcgacttcaaacgcgataaagatggtatacctggacgcgttgctacagttgagtacgatccaaaccgttcagctaacattgcactaatcaactatgtagacggagaaaaacgttacattcttgcaccaaaaggaattcaagtaggtactgaaatcatgtccggccctgaagctgacatcaaagtaggtaacgcgcttccgcttatcaacatcccagttggtacagttgtgcataacattgaattaaaacctggtaaaggcggacagcttgtacgttcagctggtacatctgctcaggttcttggtaaagaaggcaaatacgttcttgtacgtcttaactctggtgaagttcgcatgatcctttctgcttgccgcgcttctatcggtcaagtaggtaacgagcagcacgaacttatcaacgttggtaaagcaggacgctctcgctggaaaggcatccgccctacagtccgcggttctgtaatgaaccctaacgatcacccgcacggtggtggtgaaggtcgcgcgccaatcggacgtaaatcaccaatgtctccttggggcaaaccgactcttggattcaagacacgtaagaaaaagaacaaatctgataaatttatcgtacgtcgtcgtaaaaataaataacggggttgtctacggttcatttcggaccgtagtgcaatcacgaagggaggttccaaaatggctcgcagcttgaaaaaaggaccatttgtcgatggacacttgatgacaaaaatcgagaaattaaatgaaacggacaagaaacaagttgtaaaaacttggtctcgccgttcaactattttcccacaatttatcggtcacactatcgcagtatatgacggacgtaaacacgtgcctgtattcatttctgaagacatggtaggccacaagttgggcgaattcgcaccgactcgtacttacaaaggccacgccagtgacgataaaaaaacaagacgctaagagaggaggcttttaaatgcaagctaaagctgttgcaagaacagtccgtattgctcctcgtaaagcacgtctagtaatggacctgattcgaggtaagcaagtaggcgaagcagtatctatcctgaacttaactccgagagctgcttctccgatcatcgaaaaagttttaaaatctgctatcgcaaatgctgagcacaactacgagatggacgctaacaatctggttatttctcaggcatttgttgacgaaggcccaacgttaaaaagattccgcccgcgtgctatgggacgtgcgagccaaatcaacaaacgtacgagccacattacaatcgttgtatcagaaaagaaggagggataagtagtgggtcaaaaggtaaatccagtcggtcttcgtatcggagtcattcgtgattgggaatctaagtggtacgctggtaaagattacgctgacttcctgcacgaagatttaaaaattcgtgaattcattagcaaacgcctttctgacgcttctgtttctaaagtagaaatcgagcgcgcagcaaaccgcgttaacattacgatccacactgctaagcctggtatggtaatcggtaaaggcggatctgaagttgaagcacttcgtaaagcccttaacagccttactggcaagcgtgtacacattaacattcttgaaatcaaaagagcagatcttgatgctcagcttgtagctgacaacatcgctcgtcaactagaaaaccgtatttctttccgccgtgcgcagaaacaacaaatccaacgcactatgcgtgctggagcacaaggtgtgaaaacaatggtttccggccgtcttggcggagctgacattgctcgttctgaatactacagtgaaggaactgttccattgcacactttacgtgctgacatcgactatgcaacatctgaagctgacacaacttacggtaagcttggtgtaaaagtctggatctatcgtggagaggttcttcctactaagaagaaaactgaggaaggaggaaaataatatgttattaccaaaacgcgttaaatatcgcagagagcatcgcggaaaaatgcgcggtcgcgctaaaggcggtactgaagtacattttggtgagtacggtatccaggctcttgaagcttcttggatcacgaaccgccaaatcgaagctgcacgtattgcgatgactcgttacatgaaacgtggcggtaaagtttggattaaaattttcccttcaaaaccttacactgctaaaccgcttgaggtacggatgggttccggtaaaggggctcctgaaggctgggtagctgttgtaaaaccgggcaaagttttatttgaaatttctggtgtgtctgaagaggtagctcgtgaagctcttcgccttgcatctcacaaattgccaattaaaacgaagttcgtaaaacgtgaagaaattggtggtgaatcaaatgaaagctaatgaaattcgtgaccttaccactgctgaaattgaacaaaaagtaaagtctcttaaagaagaacttttcaatcttcgctttcaattagcgacaggacaacttgaaaatactgctcgcattcgtgaagtgcgcaaagctatcgcgcgcatgaaaactgtgattcgtgaaagagaaattgctgccaacaaataatcactgaggggaggtcgtgagcatgagcgaacgtaaccaacgcaaagtttaccaaggccgtgttgtttctgacaaaatggataaaaccatcactgttgttgttgaaacatacaaaaaggatcctatttacggtaaacgcgtaaaatactcaaagaaattcaaagcacatgatgaaaataaccaagctaaaatcggagacatcgtaaagatcatggaaactcgtccattatctgcaactaagcgttttcgtctagtagaagttgtcgaagaagctgttattatctaataaagttcggaattctttttccgaagggaggtaacaaataatgattcaacaagagactcgtttaaaagttgctgacaactccggtgcgcgtgaggtacttactattaaagttcttggcggttctggacgtaaaacggctaacattggtgatgtaattgtttgcacggttaaacaagcaacaccaggaggcgttgtcaaaaaaggtgaagtcgtaagagctgttatcgttcgcacaaaaagcggagcacgcagaactgacggatcatacatcagcttcgatgagaatgcatgtgttatcatccgtgacgacaagagcccgcgtggaactcgtatcttcggaccggttgcccgtgaattacgtgaaaacaacttcatgaaaattgtttctctggctccagaagttatctaatgaaataaatgccttactcaaggaggtgcgatcaggatgcatgtgaaaaaaggcgataaagtaatggttatctctggtaaagataaaggcaaacaaggtacaatccttgctgctttccctaaaaaggaccgcgttctagttgagggcgtaaacatggtgaagaagcactctaaaccaactcaagcaaaccctcaaggcggtatttctaatcaagaggcgccaattcatgtatcaaacgttatgccgctcgatcctaaaacaggtgaagtgactcgcgtaggatacaaagtggaagatggcaaaaaagttcgtgttgcaaaaaaatctgggcaagtcttagataaatagtatttaaaggaagggaggtctatctcatgaaccgccttaaagaaaagtacaataaagaaatttcacctgctttaatgacgaagttcaactacgactctgttatgcaggtgccaaaaatcgaaaaaatcgtaatcaacatgggtgttggtgatgctgttcaaaacgcgaaagcaatcgacagtgctgttgaagaattaacgtttatcgcaggtcaaaaacctgtcgttactcgtgcgaagaaatcaattgctggattccgtcttcgtgagggaatgcctatcggtgcgaaagtaactcttcgcggagagcgcatgtatgatttccttgataaacttatttctgtatctttaccgcgtgtgcgtgacttccgcgggatttctaagaaatctttcgacggtcgcggaaactacactcttggtatcaaagaacagttaatcttccctgaaattgactacgataaagtaacaaaggttcgcggaatggacatcgttatcgtaacgactgctaactctgacgaagaggctcgtgagctattaactcaagtaggtatgccgttccagaaataatcaatgaaagggaggcgaaatcgtggctaaaaagtcaatgattgcgaaacaacaacgtacaccaaagtttaaagtgcaagagtacactcgctgtgaacgctgcggacgtccgcactcagtcattcgtaaatttaaactttgccgtatttgtttccgtgagcttgcatataaaggacaaattcctggcgtgaaaaaagccagctggtaatccccaagaatgggaaggaggtaattatataatggttatgacagatccaattgcagatatgctgactcgtattcgcaatgcaaacatggtacgtcatgagaagcttgaaattcctgcttctaaattgaaaagagaaattgctgacattttaaagcgtgaaggtttcattcgtgacgttgagttcgtagaagacagcaaacaaggtatcatccgcgttttcttgaaatacggacaaaacaacgagcgcgttatcactggtcttaaaagaatcagcaaaccaggtttgcgtgtatacgctaaatcaaatgaagtacctcgcgtacttaacggtcttggaatcgcgattatttctacatcacaaggtgttttaacggacaaagaagcccgtgcaaaacaagctggtggagaagttctagcatacgtttggtaagaagtttaacaagaatggaggtgttttagtatgtctcgtgtaggaaaaaaactgcttgagatcccttctggagttacagtaacgctgaacgaaggcaacactgtagctgtaaaaggaccaaaaggagaattaactcgtactttccatcctgatatggaaatcaaaattgaggacaacgtgcttacagttactcgtccttctgatcacaaagagcaccgtgcgctgcatggtacgactcgcagtctgcttggaaacatggttgaaggcgtatctaaaggatttgaaagaggtttggaattagtcggtgtcggttatcgtgcggctaaatccggaaacaaacttgttttaaacgttggatactctcatcctgttgagatcgttcctgaagagggcatcgaaatcgaagttccttctcaaactaaagtagttgtaaaaggtacagacaaagagcgtgtaggagctatcgctgctaacatccgcgctgtacgttctccagagccttacaaaggtaaaggaatccgctacgaaggtgaagttgttcgccgtaaagaaggtaaatctgctaagtaagaccgcttaaagtgaagaaaggagtgacctaaggatgattacgaaaactagcaaaaatgctgctcgtcaaaaaagacatgcccgtgttcgtgctaaactttcaggcacagctgaaagacctcgtctgaatgtgttccgttcaaacaaacacatttatgctcaaatcatcgatgatgtaaatggcgttacacttgctagtgcctctactctcgataaagatttgaacgtggaaagcactggtgacagcgctgctgctgctaaagttggtgaactcgttgcgaaacgcgcttctgagaaaggtgtttctgacgtagtatttgaccgcggcggatacttataccatggacgtgtaaaagctctggccgatgcagctcgtgaagccggactgaaattttaataaaaaaaggagggacacatgattatgcgtcgtattgacccaagcaaattagagttagaagaacgcttagttacggttaaccgcgtagcgaaagttgttaaaggtggtcgtcgtttccgtttcgcagctctagtcgttgtcggtgacaaaaacggtcacgtaggtttcggtactggtaaagcacaagaagtacctgaagcaatccgcaaagctgttgaagatgcgaaaaagaatttgattgaagtaccaatggttggaactacgattccacacgaaatcatcggacgtttcggtgcaggcaatatcttgttgaaacctgcttctgaaggtactggagttatcgctggaggccctgtacgtgcggtacttgagcttgctggcgttgctgatatcctttctaagtctttaggttctaacacaccgatcaacatgatccgtgcaacacttcaaggtttaagtgagcttaaacgtgccgaagaggttgcgaagcttcgtggaaaatctgtagaagaactgttaggataaggagggaacattaatggctaaattagaaattaccctcaaacgcagtgtaatcggtcgcccggaagatcagcgcgttactgtaagaacacttggtttaaagaaaacaaaccaaactgtcgttcatgaagataacgctgcgatccgcggtatgattaataaagtatctcatctagtttctgttaaagaacaataaaaataaattataggctaaggaggtgtcctaatgaaacttcatgaattaaagccttcagaaggttcacgtaaagtacgcaatcgcgtaggtcgtggtattggttctggtaacggtaaaacagctggtaaaggtcacaaaggtcaaaacgctcgttctggcggcggtgtacgccctggattcgaggggggacaaatgcctttattccaacgtcttcctaaacgcggttttacaaacatcaaccgtaaggaatacgctattgtgaacgtagacaaattgaacggttttgcggaaggaacggaagtcactcctgaacttcttcttgagactggtgttattagcaaacttaatgcaggagtaaagattcttggcaacggtaaattagagaaaaaattaactgtaaaagccaataaattctctgcttctgcgaaagaagctgttgaagctgctggcggtacagctgaggtgatctaacttgtttaagacaatctccaactttatgcgtgtgagtgatattcggaataaaatcatttttacattactcatgcttatcgtctttcgcataggtgcgtttatccctgtgccatatgtaaatgctcaggcgttgcagacacaaagttcgatgggggtttttgatctccttaatacatttggcggcggtgcgctttatcagttctccatttttgcgatgggaattacgccttacatcactgcttcaatcatcattcagctgcttcagatggatgttgtgccgaagtttaccgagtggtctaagcaaggtgaagtcggccgccgtaaattagctcagttcacgagatattttacgattgtgcttggttttatccaggcattaggtatgtcttacgggtttaacaacctggcaaacggtatgctgattgagaaatccggcatatcgacatatctgattattgctttagtactcactggaggaactgcttttttaatgtggctgggagaacaaattacttccaatggagtaggtaacggaatttcgatcatcatcttcgcggggattgtggctagtattccgaaaactgttgggcagatttatgagactcaatttgtcggcagcagcgatcagctgtttattcatattgtaaaaatcgccttactggtgattgcgattttggccgttattgttggtgttattttcattcagcaggccgtacgcaaaatcgcgattcaatatgcaaaagggcaaggtcgttcacctgttggcggaggccagtcaactcaccttccgcttaaagtgaatcctgcaggggttattccggtaatctttgcggttgcgtttcttattacgccgcgtactatcgcgtcatttttcggagaaaacaatgtgacaaagtggattcaagccaactttgacaatacacatccggtgggcatggcggtttatgtcgcattaattatcgcctttacgtacttctatgcttttgtgcaggtaaaccctgaacaaatggctgataaccttaaaaaacagggtggctatatcccgggggttcgtccagggaaaatgactcaagatagaattacgagcattttgtatcgacttacgtttgtgggttctatattcttagccgtgatttccattcttcctatctttttcattcaattcgctggattgcctcaaagtgcacagattggcggaacatcattgttaattgtcgtcggggtagccttggagacaatgaagcagctggagagccagttagtgaaacgtaattaccgaggatttatgaaaaattagaggactggttttaaccattcctctaaataagagaggacgggggaaatccgaatgaacttagtcttaatgggacttcctggagccggtaaaggcacacagggagaacgaattgttgaggattatgggatacctcatatctcaacgggagatatgttccgtgctgctatgaaagaagaaacaccactcggactcgaagcaaagtcttatattgataaaggcgagctcgtaccggacgaagtcacaatcggcattgtcaaagaaagactcggcaaagatgattgtgaaagaggttttcttctggacggatttccgcgaacagtcgctcaggctgaagctcttgaaaacattcttgaggaatacggcaagccgattgattatgtcattaacattaaagtagacaaagactctttaatggaacgtttgactggacgcagaatttgcagtgtttgcggcacaacctaccatttggttttcaatccgccaaaaacgccgggtgtttgtgataaagacggaggagacctttatcaacgggcagatgataatgaggaaaccgtctcaaaacggcttgaggtcaacatgaagcagactcagcctttactcgatttttattctgagaaagggtatcttgtcaacgtcaatggccagcaggacattaacgacgtgtacaaagatgtgaaagagcttcttggaggattgagcaaatgattatctgtaagacccctcgtgagcttggcatcatgcgggaagcagggcgaatcgtggctttgactcatgaagagatgaaaaagcacattaaaccaggaatctcgacaaaagaattggatcaaattgccgaacgttttattgagaagcagggtgcaatcccatcttttaaggggtataatgggtttcgcgggagcatctgtgtatcagttaatgaagaactcgttcacggaatacccggtaaaagggttttgcgtgacggtgacattatcagcattgatatcggtgctaaattaaatggttatcatggtgactctgcttggacatatccggtaggaaacatcagtgatgatgataaacgactgctggaagtaacagaggagtctttatataaaggcttgaaggaagcaaaaccaggtgaacgtttgtcgaatatttcccacgcaatacaaacgtatgtcgaaaatgagcagttttcagttgttagggagtatgtcggacatggtgttggtcaagacttgcatgaggatccgcaaattcctcattacggtccgccaaacaaaggacctaggctgaagcctggtatggttctcgctatagaaccgatggttaacgctggcagccggtatgtgaaaacattggctgacaactggacggttgtaacggtagatgggaaaaagtgtgctcattttgaacatacgattgcgattacggaaacgggttttgatatactgacaaaagtctagatgatgaaatgaattccttgacatatgtttttcattccgcacctgggcagattgtaggtttacaattggtcggaagaaaaaccggctagctgctgtcatcggaatgaagattcatcatcgtgtactaaagcagacggagaaaagcgtacatttcattctccttagaaaaagaatatcaatcattcaccctttatgattgcgtatctccggaagttcagaacagtataaacgaaacagggcgtgtgacaaacggataactgagattttctcttttgaaatttgtcagagagcaagttactgatttgaagaagggagaacacttgaatggcgaaagacgatgtaattgaagtggaaggtacgattgtcgaaacactgccaaacgcgatgttcaaagttgaactcgaaaatggccatacggttttggctcacgtatctggtaaaatccgcatgcacttcattcgcattttacctggagacaaagttacggtagaattatctccatatgacttaactcgtggcaggattacgtaccgttacaaataaagcactccggaaactgaaggaggttggaaacacatgaaagtgagaccatcagttaaaccaatctgcgaaaaatgtaaagttattcgcagaaaaggaaaagtaatggtgatctgtgaaaatccaaagcataaacaaaaacaaggataattaataaggaggtgcccagagaatggctcgtattgctggtgtagatatcccacgtgacaaacgtgttgttatttctttaacatatgtcttcggaattggccgcacaacggctcagcaagtcttgaaagaggctggtgtttctgaagaaactcgtgtgcgtgatcttactgaagaagaacttggtaaaatccgtgatgttattgacaaactgaaagtagaaggtgaccttcgccgtgaagtttctcttaacatcaagcgtctgatcgaaatcggaagctaccgcggaatccgccatcgcagaggtttgcctgttcgcggacaaaactctaaaaacaatgcgcgtactcgtaaaggtccgcgtcgtactgtagctaacaagaaaaaataagtaagtaagggaggtacctaaacaatggctgctgctcgtaaacaaaacacgcgtaaacgtcgcgtgaaaaagaatattgagtcaggaatcgctcatattcgttcaactttcaataacacgatcgttacgatcactgatactcatggtaatgctatttcttggtcaagtgccggagctctaggattcagaggttctcgtaaatctactccttttgctgcgcaaatggctgctgaaacagctgctaaaggttcaatcgaacacggacttaaaactcttgaagtaactgttaaaggaccaggttctggccgtgaagctgcaatccgtgctttacaagctgccgggcttgaagttacagctatcagagacgtaactcctgttcctcataatggatgccgtccaccaaaacgtcgccgcgtgtaatttgtttgtatagattttgtgtccctgtcaataatgggttatgatacagttatttatgaaacgaatgcaccgactcgttgcctgagcacatacgggactaaacaatggggaatttcggatggaatctcatatgattctattcgaggtttcgacgttttgaaggagggttttaagtaatgatcgagattgaaaaaccaaaaatcgaaacggttgaaatcagcgacgatgccaaatttggtaagtttgtcgtagagccgcttgagcgtggatatggtacaactctgggtaactccttacgtcgtatcctcttatcctcactccctggtgccgctgtaacatcgatccagatagatggtgtactgcacgaattctcgacaatcgaaggcgttgtggaagatgttacaacgataatcttgcacattaaaaagcttgcattgaaaatctactctgatgaagagaagacgcttgaaattgatgtacagggcgaaggaactgtcacagcagctgatattacacacgacagcgatgttgaaatccttaatccggatcttcatatcgcgactcttggtgagaatgcgagtttccgagttcgccttactgcacaaagaggacgtgggtatacacctgctgattcgaacaaaagagacgatcagccaatcggcgtgattccgatcgattcaatctttacgccagtttctcgtttatcttatcaggtagaaaacactcgtgtaggccaggttgcaaactatgacaaacttacacttgatgtttggactgacggaagcactggaccgaaggaagcaattgctctcggttcaaagattttaactgaacaccttaatatattcgtcggtttaactgacgaagctcagcatgctgaaatcatggttgaaaaagaagaggatcaaaaagaaaaagttcttgaaatgacgattgaggaacttgatctttctgtccgttcttacaactgcttgaagcgtgcgggcattaacacggttcaagaacttgcgaacaagacggaagaagatatgatgaaagttcgcaacctgggacgcaaatcacttgaagaagtgaaagcgaaactagaagaacttggactcggccttcgcaaagacgattgatctagtttccatgtgaactaggattttcgtgtgttttttatttagaaacagcattccattaaaggaggggacatcacatgtcatacagaaaactaggacgtacgagttcacagcgtaaagctatgcttcgtgatcttacaacagatttgatcatcaacgaaagaattgaaacaactgaaacacgtgcgaaagaacttcgctctgttgttgaaaagatgatcactcttggtaagcgcggtgacttgcatgctcgtcgtcaagctgctgcatacattcgcaacgaggttgctaatgaagaaaataaccaagatgcacttcaaaaattgttctctgacattgcaactcgttacgaggagcgccaaggcggatacacacgtattatgaagcttggtcctcgccgtggtgacggtgcaccaatggcaatcatcgaattggtttaatcacatatttttgtgtatctaaagaagggcgggacagtttctaactggatctatgccctttttttagatatcagaactttttatcatgagacagacaagcagagctatagctgagaggaggccaggcgcccgtggatcaaaaacagcttatatccgtaaaagacattctattccgataccgcaaagatgcggaaagaccggcgctagacggtgtgagtctggaggtatacgaaggagaatggcttgctatcgtaggccacaacggttcagggaagtcgactttggccagagcgctgaacgggctgattttgcccgaggccggagaaattgaagtcggaggcatcaaactgactgaggataccgtgtgggatgtgcgaaaaaaaatagggatggtctttcagaatcccgataaccaatttgtcggaacgactgttcgcgatgatgtggcttttggtttagaaaacaatggtgttccgcgcgaagaaatgattgagagagtagattgggctgtcacacaagtcaatatgcaggattttcttgatcaagagccgcaccatctctccggaggtcaaaaacaaagagtggcgatcgcgggaattattgccgcgcgtcctgatattatgattttggatgaagcgacatccatgcttgacccgattgggagagaagaagtccttgatactgtcagacgcttaaaagatcagggcatggccaccgtcatttcgataactcatgacctggaagaagccgcaagggcggacaggatcattgtgatgaacggcggcaggaaatatgcagagggcacgcctgaagagatttttaaattaaacgaagacttggttcgcatcggtcttgatttgcctttctcattccagctcagcctgcttttgaaagaaagcggactggcgttaacgaaaaaccatctgactcaggaagggctggtgaatgagctgtggacattaaaatcaaagatgtagaacaccgctatcaaatgaaaacaccgtttgaacggcttgctctgtatgatatcaatgccgtaataaaagagggcagctacgttgccgtcatcgggcatacagggtcgggcaaatcgacgctcctgcagcatttaaacggtttgctgaaaccgactaaaggacagcttgaactcgggagcacgattctggcagccggtaaaaagaataaagaccttaagactttgcgaaaaaaagtcggaatcgttttccaatttcccgaacatcagctgtttgaagagactgtgctgaaggacatcgcattcggaccgatgaatttcggtgtaaaaaaagaagacgctgaacggaaagcaaaagaaatgctggggcttgtaggccttccggaagacattttggatcgttcaccatttgagctcagcggcggccagatgcgcagagtggcgattgccggcgttctcgcgatggagccggaagtgctggttttggatgaaccgacggctggtcttgatccgagagggcgccaggacattatggacatgttctatgcgcttcatcagcggggaaacctgactaccgttctcgtcacccatagcatggaggacgccgcccgctatgctgacgaaatgatcgtcatgcacaaaggaaccattaaagcgacggggagtccgcgtgacttgtttgtaaaaggcgaagagatggccgaaatgggcctggaccttcctgaatcggtaaagtttcagaggcggcttgaggcggctcttggaatcaagtatgagaaacccatgctgaccctgcaggatgccgccagtgaaattaaggctttctttcaggaggaaaaggaccaatgatggacagcatgattatcggaaagtatgttcccggatcatcgcttattcaccgattggacccgcgaacaaaacttgtcagcatctttctttttgtatgtattgtttttttggcaaacaacgtacagacgtacgctttgctcggtttgtttacattcggggtgattgccttaacgcgcgtgccgttcagctttttgctgaaggggcttaagccgattatctggattgtggcgtttacctttttattacacattttcatgacgcatgaaggatctgtcatttttcagcttggctggtttaaagtatatgagggcggacttatacaggggatttttatctccctccgtttcgtttaccttatctttatgacgacgctgctgacgctgacaacaacgccgattgaaataacagatggaatggagcagctgctgaatccttttaaaaaggtgaagctgcccgtacacgaactcgcattgatgatgtcgatatcattgagatttatcccgacattgatggaagagacagataaaatcatgaaggcgcaaatggcgaggggtgcggactttacaagcggcccggtgaaagacagaatcaaagcggttgttccgctgcttgtcccgctgtttgtcagcgcctttaaacgcgcagaagagctcgcggtcgccatggaggcgagaggctaccagggcggtgaggggagaacgaaatacagaaagctcgtctggaccggaaaggataccggagctattctgctcatcatcgtattagccgtgttattgtttttcttaagaagttagaggtgctgctgaatgagagtgaaatgtaccattgcttatgacgggcatttatttaacggatatcaggttcagcctggaaagcggaccgttcaaagtgaattggaaaaagcgctggccgtcatccataaaacggacggcagagtgcctgtgtactcatccggccgcacggacagcgatgttcatgctgccgggcaggtcattcattttgatacgccgctgtccatcccggctgagaaatggccgtttgcgctcaatgccctgctgcctgatgatattgccgtcaaaacagcagagattgcggatgatgggttccatgcacgatttagcgcggtccaaaaggaatatcgctactttgtatatacggagaaacacccggacgtatttaaacgacattacgcttaccattttgcatatcagcttaatgtgcagaaaatgagggaagcttcaaggcacctcattgggacacatgatttcacaagcttttgcgcggctgataccgcggttcaggataaggtcagaacgatttacgagctggattggactgagaccggagacggcctgcagatgcggatcaccggtaacggttttctctataatatggtcagaatcattgccggaacgttattggatacaggagctggaaaattttctcccgatgatgtaaaagcaatgctcgaagcgaaagatcgcgaagccgcggggcgcaccgcaccggggcacgggctgtatttatggagcgtttgctatgacaactaaaccaggtgtaacattttcttgacagagtctgcataaagttataagatatcatatggtatgtatttcaaccccacgataagccccggaacttattgtgttgtgaaatagaacgtaatcgaagattattgaaaatgacagatcatttaggagggaaattcaatgcgtacaacacctatggctaacgcaagtactattgaacgcaagtggttagttgttgatgcagctggcaagactttaggacgtctttctacagaagttgcatctatccttcgcgggaaacacaaaccgacttacacaccgcacgttgatactggagatcatgtgatcatcatcaacgctgaaaaaatcgagttaactggtaaaaagttaactgacaaaatctactaccgtcacactcaacatccaggcggattaaaatcaagaactgctcttgaaatgcgtacaaactaccctgagaaaatgcttgagcttgctatcaaaggcatgcttccaaaaggttctctaggtcgtcaaatgttcaagaaattgaacgtataccgtggttctgagcatccacatgaagcacaaaaacctgaagtttacgaacttcgcggttaattaaaaaggaggttaccaatttggcacaggttcaatattacggtactggccgtcgtaaaagttctgtagcgcgtgtgcgcttagttccaggagaaggtcgtatcgtcgttaataatcgtgaaatcagcgagcacattccatctccagccctaatcgaagatatcaaacaaccattaactttaactgaaacagctggtacttatgatgttttagtaaacgtacatggaggcggcttatctggtcaagctggagcaatccgtcatggtatcgctcgtgctttgcttgaagcagatccagaataccgtgcaacacttaaacgtgccggtcttctgactcgtgacgctcgtatgaaagaacgtaaaaaatacggtcttaaaggcgctcgtcgtgcacctcagttctcaaaacgttaatcgttttggatggcaaaaaccacaacttcttggttgtggtttttttgtatttttttctcatattcaagaggttatccgatgtttttctagaattgtttgttatactctattcattaccaataaggagcgcagttataatgaataagttagtcatacataacagcaaggcatgggataaaaaagtcgaaacaggcaatgaatggacggttgcggttgattctcatacgattggtgaagcgaaaaaaggcaattggagcatcagaatgacccccggaaaagatgtgccggcggattggtttccgcccatagacggtctgaaggttctttgtctcgcttcaggaggaggacagcaagggccggtccttgctgctgcaggagcggacgtgaccatctttgacaattcggaaaaacagcttgcgcaagacagaatggttgccaagcgggacgatcttacgcttcggactgtcaaaggcagcatgaatgatctgagctgttttgatgatgagtcatttgattttatcgtgcacccggtatcgaattgctttgttgatacggttcttccggtatggaaagaagctcatcgcgtattgaaaaaaggcgggtctttagtctccggttttgtaaatcccgtcgtgttcttatttgatatggatttagagcaggaaggtgtactcaaagtaaagtattccattccgttttcggatgaaaaagacctgagtaagaaaaaggtaaaggaacttattgataatcatgaagcgcttgaattcggtcatacgctggaggatcaaattaaaggtcagattgacgcaggcttcatggttgccggtttttacgaggacaaaggcggcctcgtgctggatgaatacattaatacatactccgtaacaagaagcattaaaatataaaaacggcatcccgtcagaggtgctgtttttttgcggctttttcctgcggacggctgatcacattagccgaaaccggttctattccaatttctctggcccaaaccgacagttgtcccatatggtgaatctcatgcgcaaggatgtggcggagaatatcttctttaggaaaggtttggtccatccagtccggcttaacaagatccggtcttttgagggagaccgcatgaatgacatcctcccgatactgttcagacagctttctgagatcctgaatgctcgtatagtcagactcagcaggtaaaacatcatctttacctaaaatggcacgagcccagctgatctcgacatcaatgatatgaaataaagtccgcaagatgctctccattccgcccgtccgggttttcgtcagttcctcccggctcagcttttcacatatcataaaccactcgtcacgcaccgtccaattgtattgaaacagctttttcatcacgtcacctcagctctttattcttccagttaacataaaactccttcatttgggaggatttccactatcaacaaagcatgctttttcccttttcctttcaaaataacagtaaaaaggagcgtggctggcaatggcagaagtattatctttttcagacgtgaaacggcagaaggattttgagcttgagaagagtttactaaaggagctgtcactgacgcagatcattcagtccgtaaaagcatgtcttacccctttgtttccctttcttcaagacgaaaacggcattctgagtgaaggatgcatagattttgcaattgaagcgtatttattaggcggcaggttcggcgtctttggctattatggtgagtctttgcagagggcaaacgcccgttcggctgaggaagaggaagaactgacggtcgatttttttgaatacctttgcaattggacgcatgagcaatattcttccgttaaacaaaaagaaatctatgaagcgtcctgccggtttatcaacagctggtggacggaaggatttctgcaaagagaaaaacaatgtaagctccgcatgagataatcataatttcttcccttgtcccatacttattaataacggggacaagcgggagggaaaggtatgacaaaaaagctgaaatggctcggttttttacttggctttatcatattattgtgtttattccggtttcaattccaaaatgatgattcctggcggccgtggagtctgcccctgagcgggaaaatcatctatctcgatccgggacacggcgggccggacggaggcgccacgggaggcagtcaccttgaaaaggacattactctcgaagtggcctccagggtaagagactatttgcaggagcagggagctttggtcattatgacgcgggagacggatactgatttagctcctgaagggacgaaaggctacagcagacgcaaagcggaagatctgagaaagcgcgtggaaatcatcaaccgttcagaggcggagctttatatcagcattcatctgaacgccataccgtcaccgagatggagcggcgcccaaagcttctactatggaaaatacgaagaaaatgaaaaagtggcaaaatatatacaggacgaattgagaatcaatttggagaatacaacgagaaaggcgaaacggatacacggcatttacttaatgcagaatgtaaccaaaccgggcgcgctggtggaaatcggatttctgtccaatcccgcggaagcgaaaaggctcggccagcccaaataccaggacaaaatcgcttcttccgtgtataagggcgtattgagatattttacagagaaaggagaccctcccgagtaaggagggtttttcgccgattctatgtttaatatatggtataataccatttgtaaacgaatacacaaagggtgagggttcgatgataagagaagatgaagtaagaaatatagtcggaaacatgcgcgaaccttttcttcatagaccgctgggagaattggatgccattaaagaagtaaagatcaagccggaaaaacggcatgtcagtgtaaaaattgcattggcaaaaacggggacggctgaacagatgggcattcagcaggaaatcgtatccgttctgaaagaagcgggtgcggaaactgtgggactgcggtttgaagagctgccggaagaaacattggcgaaattcagccggccggctgctgaaagcgaaaccctgctgaataggaaacacccgccggtctttcttgcggtggcaagcggaaaaggcggtgtcggcaaatcaacggtttccgtcaacctggccatttctcttgcgcggctcggaaaaaaagtcggcttgatcgacgcggatatatacggattcagcgtgccggacatgatgggtattacagttcgcccgacagtagaaggagaaaaactgcttcctgtcgaaagatttggagtaaaggttatgtcgatgggctttttcgtcgaagaaaacgctccggttgtgtggagagggccgatgctgggcaagatgctgaataacttcttccatgaagttgactggggagaggttgactatatcgttctggatctgccgcccggcacgggtgatgtggcgctcgatgtacacacaatgcttccgagctgcaaagagattatcgtatcaacgccgcaccctacagccgcatttgtagcggcgagagcgggttctatggcgattaaaaccgatcatgaagttgtaggggtcattgaaaatatggcctactatgaaagtgcaaaaaccggcgagagagaatatgtgttcggccaaggcgggggagataagcttgcagaggaattgcaggtgccgctgctcggcagaattcctttaaaacagcctgattgggacaaggaccagtttgcgccttctgtctatgacagaagtcatccgatcggggaaatttatatggggatcgcccagaaagtcattgaaaaaacagctgaataaaaaaggggccgggatcaacaaggcccggccttttattggctttctttttcagagcttgaagccgcttttttcaattcatcctcgaattgctttttgaaaagcgggctggaaagtgtctctgtaattacatcctctaagtaactgcggaacttttggcttttcaccagttcatagtattttttatccatgccggggtcctgcatgatctgcataaaacttttctgataatcagggtctttcatcagtttttttatgattttttcatgctcgggctgaagagtttttgcaaagctctcggcgaactttgagtcttcaaagatggttttccagaactccgccccttttttagaggtgagggttttctctattgtgcctttaatggcattttgatcaatcaccaatgcctcattcatcgcatcatcatttaatatttccttaattgccttttttccatcatcggtctttaatatatcaacaaccatttttttagtctggtcataatccatatccgctgcttggtcttttggagcacaagctgttacagataatacaacaaaacagcttatcaatagcgttttggcttttgacatgcataagctccttccttacttgtacttatttttaatatgattcatcggaatggatttatacataacaaaatatcgctgaacgcgattgtcagggggatgaataagagatgaaaagccgcgggcttgttcgatttttcttttcgattttagctgtgggcgctcttattacaagcgtcgtgggatttgctctgaagtggggggagtataaggggttctttctgaattttgaggccggtcagattttctccgttctgatctggtttatcggggtaggcatgattttcagtgtgatcagccagatgggattcttcgtatttctgacggtgcaccggtttgcccttgaaattctcagatcaagctcgctttggaatctgcttcagctgtttatcattctgtttgtcgcttttgatttaatgtacgtcagatttttgtttttcggagagcggaatgactcgattgtagggtttgtctggctgccgctggctctgcttgccgtcggcctgttgacggcatatataaaacaaaagcagtcctcaaaaaatacgttcgtatcatcattatttttaatggtcgttattacagcgcttgaatgggttcctgcgctacgagtgaataatgaggactggctttatttgatgctgattccgctgatgggctgcaatgcgtttcagctgctaatgctgccgaagtttgcccagaggtagttatttcacttctgatgacttgacgtcagtatttgcgatcaggtcgccgacggtcacgtttttcagtcctttttgctttaaattgtgaataatggcggggagcgcttcttcagtctgtgttgctgaatcagaggcgtgcagaaggacaatgtcgccgccttttatatgactgtttacattttcaatgattttatcaggaccgggatttgtccaatcctgcgagttgacgctgtaatgaaccactgaatagcggtactgctgtgcaatggtaagaacctttttattaaattgtccggtcggcgggcggagtaaatgaacattctttacacccagctttttaaatgcagtctgggcccggaggatatctttttttatttcattgtcctctaggttggtataattcttatacgcatatcccatgctgccgatttgatgtccgtcttttaccatacgttcaactgtgtccgggtgccgttccgcccaagaagctgacagaaaaaaagtggcgtttttaataccgtttgcttttagcgcgttcagaataggaactgctttttcgtcgccccagctgatatcgaatgttaatgcgacttcgcccgctttcgtctccccttttgaaatagccttcgggccgctatcagttaaaaatacaggaagggggacggctctctgtatataaaaaaagctggctgctgcaaatgcggcaatgataataataagcagctgttttatccttctgatgtgccacacgtagaagtgattcactgatgacgcctccttatcttgtccatgcttgattacatcgtatgctgcggcggagatgaatataacgaaatacgttttaaaaaaatgaaaaaaacacttgctaaatttaaagaatgcatggtatattattaaacgtcgctgatgaacagcagacaacaacaaaaagcttcggaaacaacttaaaaaagttgttgacataaaaggagctgagtggtaagataataaagctgcttcaacaagcggtaatgatctttgaaaactaaacaagacaaaacgtacct

SEQ ID NO: 38 - DNA, 55095 bp, Bacillus velezensis
  source 1..55095: mol_type = genomic DNA
aacacggaagttaagctcttcagcgccgatggtagtcgggggtttccccctgtgagagtaggacgccgccaagctatattatggtaaaggcagctcatgatgagctgccttttttgtttttgaataaaaacaaaacaaacaccgaaatacggaaacacccatatactaattgcaaacttcaaaaaggtccaaattgtgtatacaatcaacagcttaagggaaggctattcatacggaggtgggcaaaatgaatgaaacgtccagccatgaagaaacatgtattgtgtgtgaaaccaaaaaaagcaggggaatccatatttatacgaaatttatatgtttagagtgtgagaagaaagtagtttccactccgacctctgatccaaattatgaatttttcgttcgtaaactgaaaagccttcatacaccgacgttatattcttaaccctgaaaagggtcttttttttgcctgaaatcagaggagtttttacactttttataaaagaactgatacgataagaagaggaacttgtttagacatggaatgtaatagataatactgataaaagtgaataaataggagtcgatcaagtatgaaaccgtttattcaatatatgaaatggacgctttgcggcagcacagtttttgtattagcggggataaccttctttacgatagggcatcagccttttctgtattcgcttttatacggggcagccagcggagccgcagccagtgcggccggtctgtggaatgcgaagcgtctcttcttaaaaaaacaccggctgacaagaaaagaatatgcttatatcaaggaaaatcttgaggaagcaaagggtaaaatcatccgattacgcagggcgctttttcgctctaaaagtatacaaatgctgaagcagaatgcagagatactgcggataacccgacgaatatatctgctcacaaagcaagagccgaagcgtttttatcaggcagagcgtttctattatcaaacgcttgattctgttgtggaactgacggaaaagtatgctctgctctcatcacagccgcgaaaaaataaagatttatcaatgtccttgagtgatacgagggtgactctagcagagctttccagaaggctggaagaggatcttcatgaactgatgaaggaggacatcgacgacctgcactttgaattagatgtggcaaagcattcactgagaaaataagaaaggaagaaggaaatggccaaagaccgttccgacgacagcatgggcgcccaaaatgaccagacccctctaaagcttgcagatacgctgccggaagaaaaaagagaagcggcacttcggctcgctgaaaaactggaccctgagaacatgcaaagcattgttctgtttggttcacaggcgcaggcgaatcttctggaattttcccacacgttgatagagcacgttcaaagaaaagatgcaggagagatgggacagatactggctgatttgatgctgaagcttgaccaggtcaaccctgatgatctgcagatgaagaacaaagggtttttcgcccggctgtttaaaagggtgtccggttctgtacaggaagtgctttcgaaatatcaaaagacaagtgtgcagattgaccgtatcagcagaaggctggaacattctaaaaatgtgctgttgagtgacaataaattgttagatcagctgtacgcccaaaataaacaatacttttctgatttaactatgtatatagcagcgggggaattaaaattagatgagctgaaaacaaagctgatacccgaagcgggaagaaaagccgaattacaagaacacaatcaaatggccgcgcaggaagtgaatgatcttcgccagtttgccgaccgtctggataagagggtgcatgatctgctgctgagcaggcagattacgcttcagagtgcgccgcaaatccgcctgattcaaaacacgaatcaggcactggcagagaaaattcagtcctccattgttacggctattcctttatggaagaatcaagtcgccatcgcgctgacgcttatgaggcagcggagtgcggcagatgtgcagcagaaggcggcggatacgacaaatcaattgctgctgaaaaacgccgaacttctgaaaacaagtacagtcgagaccgccaaagccaatgagcgcggacttgttgaggcagaaaccctcaaaaaagtgcaggaaagcttagtcagcacacttgaagaaatcatgtctcttcaagaagaaggcaggatgaaacgcaggtgtgccgaggaggagcttgttatcatggaaggcgatttaaaaaagaagctgcttgatatgaggtccggccgggataacggctagatggcaaaagtcttagctttaagttggctcgcagtcacgatataataagaaagacaggcaaaggatttgtttaaaaatggacacacctttatatacagcgctgatgaagcatgcgcaccgaaatacgtattcttttcatgttccgggacatcacaatggagatgtcttttttgatgaagccaaatctgtatatcaatctcttttatctattgatatgactgagatcacgggtcttgatgacttgcattacccgacgggggtcattaaggaagcgcaggatttggtgagcagattttacggctctcaggaaagcttctttctcgtcaatggaacgaccgccggaaatctggcgatgattttagctgtttgtgaaccgggtgaacccattctgatccagcgtaattgtcacaagtctgttttccatgcggcggcattggccggagccaagccggtttatttgtcgccggaaatcgatgaaaacatgcatgtgccggcacatgtatccctttcagtcatcgaaaaagcgctggcgtcatatccgaacgcgaaaggacttgttctgaccaatccgacttactacgggcatgccgccgatttgactgcggcagttaacaaagcccattcatacggcgttcctgtactggtagatgaggctcatggggctcactttgtgttagggcagcctttcccgccttcatcattggctatgggggcggatgccgttgttcaatcggctcataaaacgcttccggctatgacgatggggtcttactttcatttgaacagcaccagaattgacagagatcgattaacttattatgtaagcagtttgcaaagcagcagcccgtcatacccgattatggcatctttagatacggcgcgcgcttatgtgcaggatattgctgaaaaagggacacttcccgttcatatggagcacattgagaaaatcaaacgaagattcgcatcaatttcttctattgaaataatcgagccttccggatatgggctgcgggcggacccgttaaaattaattcttcggtcaaaactcggacattccggctattcattacaacgcattttggagagtgaaggcattgttgccgagctggctgacgagtaccaagtattgctcgtactgccgataggcggccggcggatgatagaacaggcaaccgtaagaaacatacagcagaaactggagaatacaccgcccgataaattgccggatgccgtgaattggacatttccgtccatatcgacacttgaatacccgcaaaatgagatgcggaagtttaaaaaagagcctgcagatataaataaggctgccgggcgcttgcatgcggggaacattattccttatccgccgggaattccgctgatcatggacggagaacggataacagaagagatcgtacaaaagctttcccatttaatcggcatggacacgcatattcaaggcttgttaaacggggaacaattacttgtctatatagaagaggagaaatcatgagcggtttatttataacatttgaaggtcctgaaggtgcagggaaaacgactgtgcttcaggaaatgaaagagattctgtcggcagaggggctcccggtgacagcgacaagagaaccgggcggcatcgacattgcggaacagatcagagaagtgatcttaaataaaaacaatacactgatggatgcaaaaacggaggcgctgctttacgctgcggcgagaagacagcatttagccgaaaaggtgcagcctgcattgaaagaaggccgcattgtgctgtgcgatcgtttcatcgacagttcgctggcttatcaaggctatgcgagagggctcggcattgatgaagtcctttctattaaccagtttgcaatcggcgatacgatgcctgatgtcaccatctatttttctattgagccggaagaagggttgaaacggattacgtcgaatgattcaagagagaagaatcgtctcgatcttgaggccctgcactttcacacaaaagtacgggaaggataccaaaaggtcatgcagcgttttccggaaaggttccatacaatcgacgcatcgaaaaagaaggaacttgtcattcaggacgcacttcaagtgataaatgaagcattgaaaaaaattcagttgtgacctgtttctcataagttgctataatgaatgtaacgacaatgttctttccaacctaaagggggcctagagaatgaaactaatagtggcagtggtgcaggatcaggacagcaacaggcttttgaaagtattaaccgaccacaacttcagggtgacgaagcttgcgacaacaggcggattccttaaatcaggcaatacgacgtttatgatcggggtggaagatatccgtgtcgataaagcgctcagccttattaaagagaatggctgtaaacgtgatcagatgattgccccggtatccccgatgggcgggaatgcggattcctacgttccatatcccgtcgaagtggaagtcggcggagcgacggtctttgttctcccggtcgatgaatttcatcaattttaaggatttgacgacgtgaaaataaattctgacttacgtacatttattgagaaaaagcagcagcctgcttataaagcggcagagctttccggaacatttaaaagttcaatggacagccaaagcagcaagctgaaatttgatcagctgagcaggttcttaacggatatagaaacgttcgggaaaaggctgacgaagtcgagaaacttcaaagacttagcgaaattcaaaggattggtaaaacgttttgtaaaagaggccgtagacagcggattatcgcatgagacggagaaaagctttgacctgtacggcagcagccggactctggggcttgtgaaagaaatagatgaaaaactgctccagctgacagaagaaatgttagatcaggaaaaaccggcaattgatttgctggatcgaatcggagaaataaaaggtttattgattaacctttacacatagagagtgatacaatggcaatatcatggaaggaaatgaccgggcagcagcccagagtgatgcggcttttgcataacagtattgaaaagaaaaggctttctcacgcctatctgtttgaaggcaaaaaaggtacgggcaaattggatgccgcactgcttctcgcaaaaagctttttttgccttgaaggagggactgagccttgcggggaatgccggaactgtaagcgcatcgaatccggaaaccatcccgacctgcatgtggttcagcccgacggattatccattaaaaaggctcagatccaatcgcttcaggaagagttttctaaaacaggactggaatcgcataaaaagctgtacattatatcccatgcggatcaaatgacgacaaatgcggcaaacagtctgctgaaatttttagaggagccgagtcaagacaccatcgcaattcttattactgagcagctccaccgaatactggatactatcgtttcgagatgtcaggttcttccgttccagccgcttcagccgaaagccatagaagaaaggctgattgaacaggaagtgggccctcacatggcccggctcttagcaaatatgacaaataatattgcggaagcagtcgaattaagtcgaaatgatgagtttgcagagtccagagcgaaagtgataaaattgtatgaagtcttacatcagcggaaaggacatgcctttttcttcattcaggatcagtgggtgccctttttcaaagaaaaaacccatcaagaaatgggtcttgatatgctcttattgatataccgtgatgtattatccatccaaattggaaatgaagataaactgatttatcaagacttattccaatcaataaaacagcatgcgctgcaatttacacaacaaagcgttacgaaccaaattctcgctgttttagaagcaaaaaaacggcttcattccaatgtgaatgtgcagggattaatggagcacttggtgttaacgttgcaggagggataagcttgtacaacgtaataggcgtccgctttaaaaaagcgggaaaaatttattactttgatccgaacggatttgatatagaacaagacagctgcgtcattgttgaaaccgtaagaggtgtcgaatacgggcaggttgtcatcgcaaataaacaagtggacgagcatgatgttgtgcttccgcttcgaaaggtcatacgcgttgctgatgaacgcgatcttctcattgtagaagaaaacaaacaggaggccctgtccgcttttgaagtctgtcagaaaaaagtggctgaccacggcttagatatgaagctggttgatgttgagtttacatttgaccgcaataaagtcattttttactttacagcagacggacgggttgatttcagggaattggtcaaagacttggcttctatctttaaaacgagaatcgaattgcgccaaatcggggtgagggacgaggcgaaaatgctcggcggtatcggaccatgcgggagaatgctttgctgctccacgttcctcggtgattttgaaccggtgtccatcaaaatggcgaaggatcaaaatttatcgttgaacccaacgaagatttccggtctgtgcggccgtttgatgtgctgtttgaagtacgaaaatgatgagtatgagacggcaaaagaacagctgccggatttaggcgaaatgattacgacggcaaacggccccgcaaaggttgtcggtcttaatattctggaacgggtgcttcaggtggaactgaagaatcgtgaaaaagtgatagaatatacttgggaagagctcttggaagagggcgtcgtatccgcacaaaccacagattaacgaggtgtggaaccttggataaaaaagagttatttgatactgtcataaacctggaggaacaaatcggttcgctgtaccgtcagctgggtgacttaaagcagcatatcggcgaaatgattgaagagaatcaccatcttcagcttgaaaataagcatttgcgtaagcggcttgatgacacgacagagcaaattgagaaattcaaagccgatcagaaagaaacaaaaacacagaaggcagagcagagtgatataggagaagggtacgacaatctggcccggctgtatcaagaaggctttcatatttgcaacgtccattatgggagcgtccgcaagggagattgccttttttgtctgtccttcttaaataaaaaataaggaaaaggcttccgctgatgtcggaagcctttttcaaagagtgccgaaaggaataagatgatggtttcattacgtgatgatgaaagattggattacttattagcagaggatatgaaaatagtacagagtccgacggttttcgctttttcattagatgccgtgctgctgtctaagtttgcatacgttccgattcaaaaggggaacatcgttgatttatgcacggggaacggcattgtgccgcttttgctcagcacaaggtcaaaagccgatatcaccggcgttgaaattcaggaacgcttgtatgatatggcgctccgaagcgtggaatacaacgggctgggcggtcagatcagtctcattcatgatgatctgaaaaatatgccggaaagactcggacataataaatatgatgttgtcacctgcaatccgccttattttaaaacaccgaaagaggcggagcagaacctgaacgagcatctcagaatcgcaaggcacgaaattctttgcacgcttgaagatgtgatttccgtcagcagcaaactgctgaagcaaggcggaaaagcggctctcgttcatcggccggggaggcttttggaaatctttgaattaatgaaagcgtaccgaatagaaccgaaacgggttcagtttatttatccgaaacaaggtaaagaagcgaataccattttggttgaaggaattaaaggcggccgccctgatctcaaaattcttcccccgctgttcgtatacaatgaacaaaatgaatatacgaaagagatccgcacgattttatatggagacaaatagtcatttcttttatgtgctgctgtgcaatgacaacagtctgtacgccggttatacaaatgatctgcaaaaacggctgaaaacccacaatgagggaaagggcgcgaagtacacaagagcgcggaggccggttttgttatgccatgcggaattatttgaaacaaaacgggaagcgatgcaggcggaataccgttttaaacagctgacccgaaagaaaaaagagcaatatatagaagaaaaacgacgcagcaaggaggctgtatatgttaagacgccagatgagttttaacggaaaatctgaaatgggaactctgtaccttgttcctacaccgatcggcaatttggaggacatgacctttcgtgcagtagagacgctgaaatcggccgatgtcatagctgccgaagatacaagacagacgaaaaagctgtgccatgtttatgacatagaaacatctctcatcagctatcatgaacataataaagaaagcagcggccataaaatcattgaatggctgaaaagcggaaagaatgtggcattggtcagtgatgccggtatgccgacaatttccgacccgggggctgagattgtgagagatttcacccaaatcggcggatatgtcgttccgcttccgggtgctaatgcggcattaaccgcgctgaccgcatcaggcatcaccccgcagccgtttttcttctacggatttttaaacagacagaaaaaagaaaagaagaaagaactcgaactcctgaaaaaacggcaggaaacgatgatattttacgaagcgccgcacagattaaaagaaacattaacagcaatgcatgacgttttgggtaatcgaaccatcgccgtcacgagagaattaacgaaaaagtatgaggaattcatcagaggaaccatcgccgaggtgattgaatgggcaaatgaagatcaaatccgcggtgagttctgtctcgtagtcgaaggaaatcaaaccgcagaaccggatgaagaggaaaagccttggtggacggagctttctgagaaagagcatgtggagcattacataaacgaaggagcatcctccaaacaggccataaaacaaacagcggtagatcggggcgttccgaaacgcgagatttatgacgcttatcacattcaatcataaaaaaaaccgttcttgtatcgtaacaagaacggtttttgtatgaaatagcttatttttggttttgaagctggttttgaatttcagagatgatttgctcagcgccttctttgctgagtaccaatttgccgccggcaagtttaaggttatcatcagaaacttcaccagttacttggcaagtcatgtttggtttatattttttaaggatgattttttcatcatcaacataaatttcaagagcgtctttttctgcgatgcccagtgtacggcgaagttcgatagggataactacgcgtccaagttcatcaactttacgtacgataccagtagatttcattaacagtctcctcccgagagataattattttgtagtttatatttttcttcgtcattattcgacaaaattccttacattcctagcataacaaggtttccaataatcgtcaatctttttgtttactattgattgtaagaattagttcttatagtaagtaaagccttggaaatcctgaaataacaggctttttgactgctttttcgaacctattatcctactgaaaatccttttaaatcaagactttcgaaccaagatgttttatattagtagattatatacgacaaatttcgacatgttaagactttttttaatttcaataaaaatttttaattttatttactcttttacgcgcagtacgtatatatccttgatcttaaaggctaagatggtatcatagatagaggacaaatatcaatattgtatatcaaataaaaccgctctcgtcctttgggcgtgagcttttcgacattctgaatgggaggttgcaacatgccgcaagacaataatactttttatattacaaccccgatatattatccgagcggaaaattacatatcggccatgcttatactaccgtggccggcgatgcgatggcgcgttacaaaagattaaaaggatttgacgtacgttacttaaccggaacggatgagcacggacagaaaatccagcagaaagcggaggaagagaatatcacgcctcaagcttatgtggatcgtgcagttgctgaaatccaaaaactatggaagcagctcgacatttctcacgatgatttcatccggacgacggaaagccggcacaaagaaattatcgagaaagtgtttcaaaaacttcttgataatggtgacatttacctggatgagtatgagggctggtacagcatccctgatgaaacattctatacggaaacacagctggtggatgtggaaagaaatgagaagggtgaggttgtcggcggaaaaagccctgacagcggccaccctgtcgaattaatcaaagaggagtcatacttcttccgcatgagcaaatacgcagaccgcctgctgaagttttatgaagaaaatccttctttcatccagcctgaatcacgcaaaaatgaaatgattaacaacttcattaaaccggggcttgaagatttggccgtttccagaacgacgttcgactggggcgtaaaagtgccgggaaatccgaagcatgtcgtgtatgtatggattgacgcactgttcaactatattacagcgctcggttacgatacggaaaatgatgagctttacaaaaagtactggccggctgacgtccaccttgtcggtaaagaaattgtccgttttcataccatttactggccgattatgctgatggcgcttgatctcccgctgcctaagcaagtattcgcgcatggctggttattgatgaaagacggaaaaatgtcgaaatcaaaaggaaatgtcgttgatccggtaacgttaattgaacgctacggcttggatgaacttcgctattacctgcttcgcgaagtaccgttcggttcagacggtgtctttacgccggaaggtttcgtagaacggattaattatgacttggcgaacgacttaggaaaccttctgaatcgtacagtcgcaatgatccaaaaatattttgacggcgagattggttcatatgaaggaaatgtgaccgattttgattcagagctttcttctgtagccggtgaaacggttaaagcttatgaaaaggcaatggaaaacatggagttttcagtcgctttatcaacgctatggcaattaatcagccgtacgaacaaatatattgatgaaactgctccgtgggtgcttgctaaagacgaggaaaaacaaaaagaattacgttctgtcatgtatcatttagctgaatctttacgtatctcagccgtattgctccagcctttcttgacgcaaacgcctgaaaaaatgtttgcccagctcggagttgaggatcagtctctaaaagcttgggacagtattcagacattcggccaattgaagaacacgaaagtgaaaaaaggggaaccgcttttccctcgtcttgaagctgaagaagaagtagcttacatcaagcaaaaaatgcaaggaactgctcctgctaaagaagaaaaggcggaagagccgcaagaagcagagcgtcttcctgaaattacgtttgatcaatttatggatacagaacttcgcgtcgcagaagtcttgtccgcagagccggtgaaaaaagcagatcggctgctgaaattgcaaattgatctgggctttgaacagcgccaagttgtatcaggtatcgcaaagcattacacaccggatcagcttgtgggaatgaagatcatttgtgtaacgaatttaaaaccggtaaaactgagaggcgagctttctcaaggaatgatactggcaggagaatcggacggcgttctcaaagttgtagctgtcgaccagtcattaccgaaaggcactcgaattaaataaatagatgcaaaaggtgtttcacgtgtaacattccgtcgaacaccttttgtttttcaacaagaaaggagtttttatgatgctttttgatacacatgcgcacttaaatgccgagcaatttgacacagacttagaggaagtcattgcgcgtgcaaaggctgaaaaagttgaacggatcgtcgttgtcggattcgacaaacccactatcacgcgtgcgatggagctgattgaggaatatgactttatatacgctgcgatcggctggcatccggtagacgcaattgacatgacagaggaagatttatcatggattaaggaactgtcctctcacgaaaaagtcgtggcaatcggagagatgggccttgattatcactgggataaatcaccaaaagacgttcaaaaagaagtattccggaaacaaatcgctctcgccaaagaagtgaaccttccaattatcattcataatcgtgatgcaacggaagatgttgtcatgattttgaaagaagagggggcggaagaagtcggcggcattatgcactgctttacggggagcgcggaggttgcgcggcagtgtatggatatgaatttctatatttcattcggcggaccggttaccttcaaaaatgcgaagaaaccaaaagaagtagcaaaggaaattccgaatgaccgtttgctgattgaaacggactgtcctttcctgacaccgcatcctttccgcggcaaacgaaatgagccaagctacgtaaaatatgttgctgaacagctcgccgaattaaaagggctgacgtatgaggaaattgcctcaattacaaccgaaaacgcaaaaagatttttccgcatgaactgacagaatgcgctgtcataacgtgtaaaagcttgtccgattcagtggatatgtaaaacggttctacaagcttccttctcctcataagataggttgtcgatatgtctctcttcctttttttgctttgtttttgcataatgagggatacgctgaaggtttttcatcttcgagatgggagggttgacagcattttagatactctatataatctctccgaggagaaggaggcgtttttcatcacacaaaaaatgaaaaaactgttttccgtaaagcttggtaaaagcaaggttattcttattgcggctattattctgctgggcggaaccgggactgcatacggggcacatgagctctcaaaacaatcagtttctgtttccatcaacggcaagaaaaagcaaatacgcactcatgcaaaaacggttggggaacttctggaagatttacatatagagacgagaaatgaagaccggattaccccgtctaagcagacagcattggcagacaacatgaatgtcgtgtatgaagctgcaaagcagatccgtgtgacaagaggcggagaagaaaagactttatggtcaacggcaaaaacagtcggcgcatttctgaacgaacagcatacacctgtgaatcagcacgataaaatagatccagcagcagatacgaaagtgacaaacggcatgaaagtcacggtcgacccggcttttcaggtcactgtaaatgatgcgggaaagaaaaagaaaatatggacgacttcgactacggtcgctgactttttaacgcagcataagatggacatgaaagacgaagataaagtaaaaccggcattacacgaaaagctcacaaaaaatcaggccggtatacaaatcactcgtatcgaaaaagtcaccgatgtagttgaggaaaaaatagcgtatcaagtgaaagaaaaagaagatgcgtctctcgacagcgggaaagaaaagatcgttcaaaaaggaaaagaaggcaaacttaaaaagcattttcatgttgtcaaagaaaatggaaaagaagtttcaagaaagcttgttaaagaagaaacatctgaaaaaagcaaagatcagatcattgcggtcggcacaaagcggcacagtcccaagattgagcagctcagtgcacctgtgaaggcatcttcgggcgaaaccggatcttccggtaaagtgattaccgtgtcttccacggcttataccgcaagctgtagcggctgttccggccatacggctacaggcgttaacctgacaagcaatccgaatgccaaggtcattgcggtagacccaagcgtcatcccgctcggcacaagagtccacgtagacggatacggggaagccgtggccgctgatacgggctcagccattaaaggaagacggattgatgtctttttccctgaaaaatcttcagcttaccgctggggaaagaaacaggtcaaaataaaaatcttaaattaattccgattcactcagagggttttgcgccctctgtttttttcgttataataggtaaagtgtattttcagtatattagacgtgacatgcaagcaaaggtttcgttttggatataaaaagtttttttggaggaagtaatgaaaattaaagaaattattgtagtcgagggacgcgatgacactgcgcgcataaaacttgccgttgatgcggatacgatcgagacaaacggttccgcaatcggagacgaagtcatcaggcagattcggctggcgcaggaaacgagaggggtcatcgtgctgacggacccggattttccgggggaaaagatccggaaaaccatttctgaagcagtacccggctgtaaacacgcatttctgcccaaacatcttgccaaaccgaaaaacaagcgcggcattggcgttgagcacgcatccattgaaagcatcagagcatgtctggaaaatgtgcatgaagagatggaggcaaagccgagtgagatttcagctgaagatgtcatacaggccggtctgatcggcggaccggctgccaaaagacgccgcgaacgattgggcgacctgctgaagatcggctatacaaacggcaagcagcttcaaaaacggctgcaaatgtttcaaatcaaaagaagtgattttattgatgcgctcgatgctatgaggcaggaggaacaggatgaacaataaagatatcgcgacacctatcagaacgaaggaaattctgaaaaagtacggtttctcttttaaaaagagtctgggacagaatttcttaattgatacaaatatattggacagaattgtggaccatgcggaaattacggatcggaccggagtcattgaaatcgggcccggaatcggcgcgctgacagagcagcttgccaaacgggcgaaaaaggtcgtcgcgtttgaaattgatcagcgcctcttgcccattctcaatgatacgctgtctccatatgacaatgtaacgatcattcatcaagatgtgctgaaagcagacgtcaaatccgtcattgaagagcagtttcaggattgtgatgaaattatggtgacggcgaatctcccatattatgtgacgacgcccatcatcatgaagctattggaagaacatcttccgttaaaaggaattgtcgtgatgctgcaaaaagaggtcgctgagcggatggccgctgatccttcctctaaggagtacggatcgctttccattgcggttcagttctatacggaagccaaaaccgtcatgaccgtcccgaaaacggtgtttgtgcctcagcctaatgtcgattcagccatcatccgtctcttgcttcgtgacggcccggcggttgatgtcgataatgaaccgtttttcttccagctgattaaagcaagcttcgcacagcgccggaaaaccttgctgaacaaccttgtgaacaatcttccgggcggaaaagagaaaaaagctcaaattgaagaagttcttcaagaaacgaatattgacggaaagcggcgcggtgaatccctgtccatagaagaattcgcgctcctgtccaacggattgcataaagcccttttctaagagggctttttgttttgcgtcaccacttggactgccgctacataggctagaggagaaccttattcattcaactgcaagaaaagcttgaaacatcaagcgccgcagcggaaagaggtgtatttgccaaggacttctttcatgatgaggcttagtctatttgtggagtgggtaacgtgcaatttcaaataggagatatggtagccaggaaatcctatcaaatggatgttttatttcgcattatcggtatagagcaaacaagcaacggaaattcaattgccatcctgcatggtgacgaagtcagattgattgcggatgctgatttttctgatttggagcctgtcagaaaagacgaacaggccatgagaaagaaaagagatgaaagcaggatgaatgaatctctcgagctgctccgccaggattataagctgcttcgggaaaaacaggaatattatgcgacaaatcaatatcagcatcaggagcactactttcatatgcccggaaaggtattgcatctggacggcgatgaggcctatttgaaaaagtgcctgaacttttatgaaaaaatcggtgtgccggtatacggaattcattgccatgagaaaaaaatgccggcatcaattgacgagctgctagataaatacaggccggatattttagtcatcaccggccatgatgcatattccaagcataagggaggcgtgaacgatttaagcgcctacaggcattccaaacactttgtcgaaaccgttcaaaaagcgaggcgtaaagtccctcatttggatcagctggtcatattcgcgggggcctgtcaatctcatttcgagtctttaatcagagcaggcgcgaatttcgcaagttcgccgtcacgcgtcaatatccatgcgcttgacccggtatatattgtcgcgaaaatcagcttcaccccgtttatggagcggatcaatgtatgggatgtcctgagaaatacgctgacgagagagaaagggctgggaggaattgaaacgaagggtgtgctgcgtgtcggtatgccgtataaatcaaatggatgagtgataaaacccgcatatatttcgctatgcgggttaattattttacatattgatacataaatttccggaacttgtgaaaaataacgcagaaatcaatagaattttgtcaaaataattttgttgacaatgacttattaacgttgatataatttaaattttatttgacaaaattgggctcttgttgtacaataaatgtagtgaggtggatgcaatggcgaagacgttgtccgatataaaaagatcgcttgatgggaatttaggtaaacggcttacgttaaaagcaaacggcggccgccgaaaaacgattgagcgttcgggcattttagctgagacgtacccttctgtttttgtgatacaactagatcaagacgagaattcgtttgaaagagtttcatacagttatgctgatattctgactgagactgttgaattgacattcaatgacgatacggcaagctcagtagcattttaatgggcagtgaaccttttgtttactgctttttgttttgccttctaaagctcttctaattattccctcgaaagtttcagccgattaaacggaagctataggtgtcacatgttttatcgtggcgtgcacgaatggtgatcaattctataaaaggggttgtttcgtttgggcagacgtcgtggagttatgtcagatgagttcaaatatgagctggcgaaggaccttggtttttacgatacggtgaaaaacgagggctggggaggcattcgggcgcgtgacgccgggaatatggtaaagcgcgcgattgagattgccgaacagcagatggcggctcagaaccaaaataaccgataatgcagtggcccgggggacaatccgttccccggttttttctatcggctgtcaaaaccggcgtcaatttcggataagtacctccgggtctccaaatgtgatacaatgttcatacttatgtttagatggagaagtaggtgaaagctatgcgtattttagaaaaagcgccggccaaaatcaatctgtccctcgatgtgacgagtaaacgcccggatggttatcacgaagtggagatgatcatgacgacaattgatttggcagatcggattgaactgacagaactgcccgaaaacgttatcagagtggcgtcgcataaccgctttgttccggatgatcaaaggaatctggcttatcaggcagccaaactgcttaaagaacggtttcaagtcaaaaaaggcgtttccattatgattacaaaagtgatccctgtagcggcagggcttgccggcggaagcagcgatgcggcagccacgctcagagggctgaacaggctttgggatttaaagctttctgtcgaagagctcgcggagcttggagctgaaatcggttcagacgtgtccttctgtgtatacggaggcactgccctggcaaccggacgcggtgagaagatcaggcacatcagtgctccgcctcattgctgggtcgtgctcgccaaaccgacgatcggggtatcgactgccgaagtgtaccgccggctgaacttacagcaggttcggcatcctgatgtgcaggcgatgattgacgcgattgaagaaaaaagcttccaaaaggtatgcggacaattaggaaacgtattggagtcggttacgctcagcctccatcccgaggtggcgatgattaaaaatcaaatgaaacgcttcggcgctgatgcggtgttaatgagcggaagcggaccgactgtattcggtttggttcaatacgaatcgaaggtgcagcggatttataacgggttaagaggtttctgtgatcaagtgtacgcggtgcggatgatcggcgaacagaatgctcttgattaaatccgtatgttaagttatattatttttaaattattcggattttgggggtaagttcatgaagtttcgtcgcagcggcagattggtggacttaacaaattatttgttaacccatccgcatgaattaataccgttaacgtttttctcagaacggtatcaatcagcaaagtcatcaatcagtgaagatttaacgattattaaacagacctttgaacagcaaggcattgggacgctgcttacagtgccgggagctgccggaggcgtcaaatacattccgaaagtgaaacaggcagaagcagaagcgtttatacaggagctgggacagtctttagtaaatcctgagcgtatccttccgggcggttatgtatatttaacggatatcttaggaaaaccctctgtcctctctcatgtaggcaggctttttgcttccgtttttgcggagcgggagattgatgtggtgatgaccgttgcgacaaaaggaatccctcttgcttacgcagcggccagttatctgaacgttccggttgtcatcgtgcgaaaggacaataaagtgacggaaggctccacggtgagcatcaattatgtatcagggtcatctaaccgcattcaaacgatgtcgcttgcgaaaagaagtttggctacgggttcgaacgttttgattattgacgactttatgaaagccggcggcaccattaacggcatgatcagtttgcttgatgagtttaatgcaaacgtcgcgggaataggtgtcttggttgaagccgagggagtgaatgaacggcttgtcgatgaatacatgtcactgctcacgctttcaaccatcaatatgaaagacaaaacgattgagattcaaaacggcaattttctgcgattttttaaagaacagcatttaaagaatggggagacagaaaaatgacaaaagcaatccatacaaaacacgcgccggcagcgatcgggccatattcacagggaatcatcgtaaacaacatgttttacagctcaggccagattcctcttactgctgaaggagaaatggtaaacggtgatatcacagaacaaacgcatcaggtgttcagcaatttaaaagctgtgctgaaagaagcgggcgcttctctcgagacggttgtaaaagcaacagtatttattgctgatatggagcagtttgcggaagtgaatgaagtgtacggacaatactttgatgtacataagccggcaaggtcttgtgtggaagtggcgagactgccgaaagacgctctcgtggaaattgaagtcattgcgctggtgaaatcttaaatctcagaaaagtggttccggtctccgggatcactttttttatgcagtatatgatccccaaatatggtttatcacctaattgtgtatgtatatcctatattttcaaaaaaactttttgaaacgtgcaggaatttaaaaagaatcgtggaattgttagactaatgcttttatatagggaaaaggtggtgaactactgtggaagttactgacgtaagattacgccgcgtgaataccgatggtcgcatgagagcgattgcatccatcacgctggatcacgaatttgtcgtacatgatattcgtgtgattgatggaaacaatggtcttttcgttgcgatgccgagtaaacgcacccctgatggagaattccgcgatattgctcatcctattaattccagcacgcggggcaagatccaggatgctgttttaaatgagtatcatcgtttgggtgattctgaagcattagaatatgaagaagccggggcttcttaaacataacaaaatgtaaggactgctgataaaggctgacacaaggccttttccggcagtccttttttaaatctgatttttcagtaataaagcgattacatagaaaattcttgcactttttgatgtcttcttgaaatcaacagctatttaggatatatttttctatggataaaagggatattggaggccattaaatggataagcggtttgcagtgattttagctgccggaaaaggaacgagaatgaaatcgaagctttacaaggtccttcatccggtatgcggaaagcctatggtagagcacgtcgcagacgaagctctgaaattatctttagcgaagcttgtcaccatcgtaggacacggcgccgaagatgtgaagaagcagctcggacagaaaagcgattacgctctccaagcagaacagctcggtacggctcatgcggtcaaacaggcaaaaccatttcttcacggagaaaagggtgtcacgatcgttatttgcggcgatacaccgcttctgacggcggagacgatggaagccatgctgaatgaacatacagacaaaggtgcaaaagccacggtgttaacggccgttgccgacgatcccgccggatacggaagaatcatccgcagtgaagacggcgccgttcaaaaaatcgtggagcacaaggatgcttcggaacaagaacgtcttgtgaaagaaattaacacgggaacgtactgttttgataacgaggctctttttcgtgtcatcgaacaggtttcgaatgaaaatgcccaaggcgagtattatctgccggatgtgatcgaaatcctcaaagacgaaggcgaaactgttgccgcttaccagactggtaacttccaagagacgctcggagtgaatgatagagtcgctctttctcaggctgaaatgtatatgaaagagcgtattaacaaacggcatatgcagaacggagtcactttaatcgatccgatgaatacgtacatctcacctgacgcacgtatcggacaagatacagttatttatcccggaactgtgttaaagggacaagctgaaatcggcgatgaatgtgtcatcggccctcacactgagatagaggacagctcaatcggcagccgcactgtgattaaacaatccgttgtcaatcgcagcaaagttgggaatgatgtaaatatcggtccttttgctcacatcagacccgattccgcaatcggcaatgaagtgaagatcggaaactttgttgaaatcaagaaaacacaattcggcgaccggagcaaagcatctcatttaagctatatcggtgatgccgaagtgggcacggatgtgaatctgggctgcggctccatcacggtcaattatgatgggaagaaaaagtatttaaccaaaattgaagacggcgcctttattggctgcaactccaatctggtcgctcctgttacagtaggagaaggcgcgtacgtcgctgcgggttcaaccgtaactgaagatgtgccgggcgaagcgcttgccattgccagagcaagacaagtaaataaagaagattatgtgaaaaatattcataaaaaataatcctaaaatcggaggtttaccatgtctaacgaatacggagataagaatttaaagattttttctttgaattcaaatccagaacttgcaaaagaaatcgcggataatgtaggggttcaattaggaaagtgctctgttacaagattcagtgacggagaggtccagatcaacatagaagaaagtattcgcggctgtgattgctatatcattcagtctacaagtgcgccggtcaacgagcacatcatggaattgctgattatggttgacgctttaaagcgcgcttccgcgaaaacaatcaacattgtcattccgtactacggttatgcgcgccaggacagaaaagcaagatcacgtgaaccgattacggcaaaactttttgcaaacctgcttgaaacagcgggtgcgacacgcgtgatcgcgcttgatttacacgcgccgcaaattcaaggtttctttgatattccgattgaccacttaatgggtgttccgattttaggccattactttgaaggtaaagacttgaaagatatcgtcattgtttctcctgaccacggcggtgtgacgcgcgcccgcaaacttgcggaccgtctgaaagcgccgatcgcgattatcgacaaacgccgtcctagaccgaatgaggtagaagtgatgaacatcgtcggtaacgtggaaggtaaaacagcgattctgatcgatgatattattgatacggccggcacaatcacacttgccgctaacgcgctggttgaaaacggagctgcagaagtgtatgcatgctgtacgcaccctgtactgtcaggtcctgccgttgagcggatcaataactctaaaatcaaggagcttgtcgtaacgaacagcattaagcttcctgatgagaaaaaaatcgaccgctttaagcagctttctgtcggaccgcttctggctgaagcgattatccgcgttcacgagaaacaatctgtcagctatttattcagctaaaccgaaactttaaggtttaaatcccagttattgtgggtattgttctaataggacgataaaacgataattaggatggtgctgaatatggcaactttaaaagcaaatgaaagaacagattttaaacgttcgacgcttcggaaaatccgtcattcaggacatgttccagggattatatacggtaaagaaacaacgaatacgcctgtctctttagacagtgtcgaattgcttaaaacattgcgggacgaaggaaaaaacacgattatcacaattgatgtcaacggaaatcagcaatcggttatggtgactgatcttcagacagacccgctcaaaaacgaattgacgcacgccgattttcaagtcgtgaatatgagtgaggagctggaggccgaggtgccgattcagctgacgggagaggcgaagggagtcaaagacggaggcgtcatccagcagccgctgcatgagctttcgattaaggccagaccgaaggacatccctcagacaatcaatgttgatatttcaggacttgagatgaatgatgtgctgaccatcgcagatctgactgctgacggcaattatacatttgcaaacgatccggaagaagtcgtggcttccatccttcctcctaagcaggaagcattcgaagaagatgcagaaccgtctcctggggaagagcccgaaggagaaaatcaataagcgctttaagacgtaacccgcccgaggttacgtcttttgtgctagaatgagaagaattacagcgatgttgagggaggatttacgatgcttgtgattgccggtctcggtaaccccgggaaaacctatgagaacacgagacataatgtcggctttatggccattgacgagctttctaaagaatggaatattgaactgaataaaacgaaattcaacggactttacggaatggggtttgtttccggaaaaaaagttctacttgttaaaccgcttacatatatgaatttatcaggggaatgtttgcggccgctactggattattatgatgccgatcatgaagatctgaaagtcatatacgatgaccttgatcttccgacgggaaaaatcagacttcggacgaaggggagcgcaggcggacataacggaattaaatcgcttatacagcacctcggaacccctgaatttgaccgggtcagaatcggaatcggccgccccgtcaacggaatgaaagtcgttgactatgtactgggagcttttacgaaggaagaagcgccgcatatcaatgatgccgtctcaaaaaccgtaaaagcctgcgaagcttccttaacgaaaccatttttagaagtcatgaacgaatttaatgcaaatgtataagataaataatgggagaccatactagggaaaaatgattttttcacatcaggaggtccaacgtatggctttgcattatttctgccgccactgcggctttaaggtagggagcctggaatattcgacggtgccgacacagtcacttggatttcagcacttaacaaatgaggaaagaaacgatatgatttcatataaagacaatggagatgtccatgttcttacaatttgtgaagactgccaagaggcgctggagcgcaatccgcactaccatgaacacaacacatttattcaataagaagctttggtgtagattctagaccaaagcgtttttctgttcttgcagaaaatagagaggagggcccatatggacaacattcaaacctttattaaagaaagcgatgattttaaatccattgtcaacggtttacatgaggggctgaaggaacagctgcttgcgggtctgtcaggttccgcgcgttctgtttttacctccgcccttgcacaggaaacgaaaaggccgattttctttatcacccataatttatatcaggcccaaaaagtgacggaagatctgacggcgcttctcggggatcaatctgtttttttataccccgtgaatgaattgatttcttcagaaattgcggtagcgagccctgaactgcgcgctcagcggcttgatgtcattaatagattaacaaacggagaagcgccggtcgttgtggcgcccgttgcggcagtgagaagaatgcttccgccgaaggagctgtggaaaagcagccagatcgtcatttcactcggagacgaaatagaaccggatcagctgtccgcgcgccttgtagaggtggggtatgagcgttccgatatggtttctgcacccggtgaattcagtattcgcggcggaattatcgacatttatccgctgacgtcggagcatccggtgcgaattgaactgtttgatacggaggtcgattccatcagaagcttcaattctgatgaccagagatcaattgagacgctcaaacatgtggcgatcggaccggcgaaggaattgatcattagggcggaagaaaaagcccgggcaatggaaaggctcgataaagggcttgccgacagtttgaaaaagctgaagcaggacaaacaaaaggaaatgcttcatatcaatatctcacatgataaagaacggttatcaacgggacagactgatcaggaacttgtgaagtatctctcgtacttttacgaaaaacctgctagtttgctagattatacaccggcagacacgttgttactgttagacgaggtcagccgcattcatgaaatggaggatcagctgcaaaaagaagaggccgaatttatgacaagtctgctcgaggaagggaaaattctgcatgacattcatttatccttcagctttcaggagcttatgagcgaaaagcggcgcccggctatttattattcattatttttgcgtcatgtccagcatacaagccctcagaatatcgtgaatgtgacaagccggcagatgcagagttttcacgggcagatgaatgtgctcgcaggtgaaatggagcgctttaagaaatcaaacttcaccgtcgtctttttaggcgcaaataaggacagaaccgacagattggcatccgtgctggctgattacgaaattgaagccgcaaaaacggacagctccaaagcgcttgtgcaaggacaggtctatgtcatggaaggcgagctgcaatccggttttgaactgccgctgatgaagctggccgttattacggaggaagagctgttcaaaaaccgaattaagaaaaagccgagaaagcagaagctgacaaatgccgaacggatcaaaagctattccgagcttcaggtcggtgactatgtcgtccacgtcaaccacgggatcggtaagtatttggggatcgaaacactagaaatcaaaggcattcataaagattacctcaacattcattatcagggcagcgataagctgtacgtccctgtagaacaaatcgaccaggtgcagaagtacgtcggctctgaaggaaaagaaccgaagctttataaactgggcggcagtgaatggaaacgggtgaagaaaaaagttgaaaactccgttcaggatattgccgatgatctgattaagctttatgcggaacgggaagcaagcaagggctatgcgttctcgccggatcatgaaatgcagcggcagttcgaatctgctttcccttatcaggaaacagaggaccagctccgttccattcaggagattaaaaaggatatggaaagagagcgcccgatggaccgtttgctttgcggtgatgtcggttacgggaagacggaggtagccatccgagcggcctttaaagcgatcgcagacggaaagcaggtcgcgcttcttgtgccgacgacaatactcgcgcagcagcattatgaaaccattatggagcgtttccaggactatccgattaacatcggtcttctcagccgattcagaacgagaaaagaatccaatgaaacgattaaaggcttgaaaaacggaacggtagacatcgtaatcgggacccacaggctcttatctaaagacgtcgtctataaagatctcggcttgctcatcattgatgaagagcagcgctttggcgtaacgcataaggaaaaaatcaaacagatcaaagccaatgtcgatgtgctgactcttacagcgacgccgataccgcgtacgcttcatatgtccatgctcggtgtgcgggacttatctgttattgaaacgccgccggaaaaccgtttccctgttcagacatatgtcgtggaatacaacggcgcgcttgtgcgggaagccatcgaaagagaactggcgcgcggaggacaggtatatttcttgtacaaccgcgtggatgacatcgagcggaaggctgatgaaatttccatgcttgttcccgatgcgaaagtggcatatgcccacggaaaaatgaccgaaaatgaattggaaagcgtcatgctcaattttctggaaggggaatcagacgtccttgtcagcacgactattattgagacaggcgtagatataccaaatgtgaataccttgattgtgttcgacggagacaaaatggggctgtctcagctgtatcagctgagaggacgggtcggccgttccaaccgcgtcgcttacgcgtattttacgtaccgcagagacaaagtgctcactgaggtggcggaaaaacggctgcaggcgattaaagaatttaccgagctggggtcaggctttaaaatcgccatgcgtgacttgacgatcaggggagcggggaaccttctcggcgcccagcagcacggctttatcgactcagtcggttttgacctgtactcgcaaatgctcaaggaagcgattgaagagcggaaaggcgatattccgaaaagcgaacagtttgagacagaaatcgatatcgagctggacgcgtatattcctgaaaactatatacaagacggcaagcaaaaaatcgacatgtacaaacgcttcaggtcaatcgccacaattgaggagaaaaatgagcttcaagatgaaatcattgacaggttcggcagctatcctaaagaggttgaatggctgtttacggttgctgagatgaaggtatacggaaaatatgaacgcgtcgaactcatcaagcaggataaagacgcgatcagatttaccatttctgaagaggccagcgcacagattgacggccagaaattgttcgaactcggcaataaatacggccggcagatcggactgggaatggaagggaaaaagctgaaaatctcagtacagacgaaaggccgcaaaacggaagagtggctggagaccgtgctcggcatgctgaaaggccttcagggtgtgaagaaagaaacaatcgcgtcttcataaaaattgttactctctggtgtatattacatttgatgtgacggatactaatttcaagcgagtggcggaagctacataaagtaaagagctttagtactttcccttaaatatcatcacatgaaagagaggcaccagagagatgaaagctacaggtatcgtacgtcgtattgatgatctaggacgggtcgtcatccctaaagaaattcggagaacactgcggatcagggaaggagacccgcttgaaatattcgttgaccgcgacggagaagttatattgaaaaaatattctcctatcagtgagcttggcgattttgcgaaagaatatgcagatgcattgtatgacagtctcggccattccgtcttgatttgcgaccgtgacgcgtatattgccgtttcaggcagttcgaaaaaagaatttctgaacaaagccatcagcgatttgctcgaaaaaacgatggatcagcgcagctctgtggtagaaaacgacgtgaagtccgcgcagcttgttaatgacattgatgaagatatgagctcctatacaatagctccgatcgtggcaaatggcgatcctatcggcgccgtggtcatcttttccaaggaacaggcacttggagaagtagaacataaagcagtagaaacggcagccagttttttggcgagacaaatggagcagtaggtcttattaccattattgaaataagaaaacggagaaagaacagctcttatacaagtgctgttctttttcatattcatatgtgctctctatcggttcggccgttaggattgtgatataataagctcgttttatagacgtaattttctagcggctggaaggagcttttggatgaacgattcagttggcgccaatcggcaatcggcatggaaaggtgcttttgtgctcgtcgttgcgggtatcgtgacgaagatattaagcgccgtgtacagggttccttttcagaatattgtcggtgacgtcggattttacatttatcagcaggtgtatccgtttttagggatcgcggtcatgctgtcaacatccggttttccggtaatcatctcaaaattaatgaacgattatagcgatcataaacaaaaaataatgaaaatttccgccctttatgtcacggcggccggacttgttctgtttgcgctcatgtatgccggcgcggcgccgttggccggttttatgggtgacgtccgccttgtgatgctgataagggtcgcggcgttcgctttcatactgtttccgtttacggcggttttcagggggtatttccaaggcgtgcatgatatgatgccgtcagccttatcccagattacggaacagcttcttcgcgtggcggtgcttcttggtttatccttctggcttttgaaaagcggccgttcattatacgcggctggtgcgggggcggcctcgggatcaattgccggaagcttggcggccctttgtgtattggctgttttctggtataagcgggaagaaacaaagaaagacggcggacatatcgaaacggccgtcattgtaaaaaagctgctgctttattcagtcaccatctgtatcagcagtgtactcatgcttttgattcagcttgtagacgccttaaacttatattcactgctttcagacgggacggagagccatgccgcgaaacggctgaaaggcatatatgaccgcggacagccgctccttcagctgggaaccgtgtttgccgtcagtattgccgcgtcattggtcccttcaatttcaaaagcggtgcatgagaataagccgtttatcataaaagagaaagcaacatcagccgtcaagctcagccttgcggtagggatcggtgcatcagccgggcttttttgcattttaaagccggtgaatatcatgcttttccaaaacagtgaggggacgcagaccttacaaatattcagcttatctatcttttttgcctcaattgcgcttacggcagccgcgattctgcaaggagcgggacataccgttttccccgccgtatccgttttggcgggaggggcgctgaaatgggtgctgaatgtttggctggtccccggctggggtattacaggagcggcactggcgaccgtcttggcatttgccgcagttgcgtgcctgaatctccggagaatttggtcgaagggctggctgacgaatatcggaggcgtgattgcccgtctgtgctggtgcagtctgctgatggtcttctttctgctcgtatatatgaagctatggcagttatttgttcctgtcagcagagccggagctgtatgtgagagtctgtctgcgtcagtcatcggagggctattgtttatttattgtatgataagaatgaagattttcacggacgaagagctgagcggccttcctttgggcagtgctttaagcaaattgaaaaagaggagagaaaaacatggcaggtaacattacggtcgtcggccttggcgccggagacatggatcagttgacagtgggcgtacataagctgctgactcaggcgaagcatttatatataagaacgaaagaccaccctttgattccggaattagagcaagagacggaaacggacatccggtattttgatgatatttatgaaaaacatgatcagtttgaagcggtctatgaagagatcgcagacattctgtttgaaaaagcgaagcaagaggatgtcgtctacgctgtgcccgggcatccgtttgtcgctgagaaaaccgttcagctgttatttgaacgccgggaagaacaacaggtagctgttcatactgccggagggcaaagctttttagatgccacttttaatgcattgcgaattgatccgattgaagggtttcaatttacggatgcgcaaacaatgacgccggatgagctcgaactccgccatcacctgatcatttgccaggtttatgaccaaatgacggcctctgaggtgaagctgacgcttatggagaaactgcctgacgactatgaagtggtcatcgtcacggcagccggaagcaaaggagaaaagataaccaaggtgcctttgtttgaacttgaccgcaatgtagaaataaataacttaacaagcgtgtatgttccgccgattaaaaaagaagaactcctttaccaggaattttctgcattccgtagtattattcgcgagcttcgcgggccgaacggctgtccgtgggatcaaaagcagacacaccagtcattaaagaaatatatgattgaggaatgctacgaactgcttgaggccattgacgaagaggacacggatcacatgatagaagaactcggggacgtcatgcttcaggttatgctgcacgcccagatcggagaagacgaggggtatttctcaattgatgatgtcatcagagacatcagtgcgaagatggtcagacggcacccgcacgtgtttaaggatgttaaggttcaggatgaacatgatgtcgtcgccaactgggaagaaatcaaaaaggcggaaaagcaaacaacatcctcttcattgctggatgccgtgccgaaaacactgccttctcttgcaaaagcggccaagcttcagaaaaaagccgcgaaaaccggctttgactgggatgacgttcaggatatatgggataaagtaaatgaagagctgaaggaattttctgcagaggcttccgccgaatcagcagatgaaatcagcttaaaagctgaattcggcgatgttttatttgcattggtcaatatcggccgatactataaaattgagcctgaggaagcgctcgccatgacaaatgacaaattccgcagacgctttgcttatattgagaaagaagcggcagcaaagggacttgaattgaccgcaatgtcacttgaggaaatggacaaattgtgggatgaagcaaaagaaatggagaggagattctgatatgagacttgataagtttttaaaagtatccagattaattaaacgccgcacattggcgaaagaggtcgccgatcaagggagaatcaccgttaacgggaatcaggcgaaagccagctcagacgtaaaagccggtgatgaactgacggtccgcttcggccagaagcttgtcaccgtgaaggtaaacgaattgaaagaaacaacgaaaaaagaagaagccgcgggcatgtatacaatcgtcaaggaagaaaaactcggcgaataggcttgttctaaacaaggctcccgcctcatacaatgcagtaataatgctaaaagtatcgaggatatgggggctgaatagatgaattcatattatgagcaaaaaggttcttcttctgttccggaacagcatgatgtaacgatgaaagggagaaagcatttagacatttcgggcgtcaagcatgtagaaagttttgacaacgaagagtttttgctggaaacggttatgggaatgctttccgtcagaggtgagaacctgcagatgaaaaatcttgatgtggaaaaagggattgtatctataaaaggcagggtgtttgaccttgtatatttagacgagcagcaaggggataaagctaaagggttttttagcaagttgtttaaatgacgctgacgacccaattttatacgatgctggcaatgaccggtatgggcgcctggctcggagcgtcgcttgatacatacaggctgtttgtcagccgcgccaaaacggccagatggctgttattcattcatgacattctcttttggattgtacaaggtctgctgtttttctatgtgctgctcaacgtgaatgaaggagaactcagggtatacattttcttggctgtcttactgggtattgcgacgtaccaaagcctgtttaaacgaatgtatataaaaatactgaaatttgccattcatcttgcggtgtctctttaccaattcgcaaaaaagctcattcagcacgtgctgttccgtccggtgcttctgctctttaagctgctcatcgggctgatcacggctatttctttatactcctatcgggtgagtgccttttttgcgaagtgtctttttaagatcgtaacgtttttgctgtatccgctgtttttcctgttgaaacaattattgaaacttcttcctgaaaagtggcgtcttactttcaaacgatattttcaaaaaagtgcaggatttttacaaaagagcaagaaactaatcataataatcagatcgaccatgatacgtattttgaaaaggtgaaaggaggaccgtctggtttgaatctatctagagaacgtacaataactgaaattcaaaacgactataaagagcaggttgaacggcaatcccagcttatgaaaagaaggcggaaagggcttttcagacggttgatcgtattcggcgcccttgtgttgttgacggctattgtcttagcgggttctctttggtcacagacctcttcccttagcgcaaacgaagaaaagaaagctaggctggaaaaacaagtaaaagaattgaacgcgaaacaggctgatttaaaagatgaaatttccaaattaaaggatgaggattacgtcacagagcttgccagaagagacttgtttatgtcaggaaatggtgagattctcttcaatgtagagaagaagagcaagtagccttgttgacacttaaatttttatttaggtataattaaacaaacgatctttttataagcctaaggaggagcactttttttatgtcgattgaagttggcagcaagttgcaagggaaaataacaggtattacaaatttcggagcatttgttgaattgcctggaggctcaaccggtctcgttcatatcagtgaggtagccgataattatgtaaaagacattaacgagcatttaaaagtcggcgatcaagttgaagtgaaagtcatcaacgttgaaaaagacgggaaaattggtttatcaattaaaaaagctaaagaccgtccgcaagccagacctagaaatgatttccgtccgaaagaatcttttgaacagaaaatgaacaagtttcttaaagatagcgaagaccgcttatcatctttaaaacgaaacacggaatcaaaacgtggagggcgcggagcaagaagaggataacttgctgctttctataaatacatggagcatccgtctatcccagcgggtgcttttttttgtatgtgtccgtatagtcagaaaattaaaactttaaagttcctgttgacggaatgaagaaacctttgtattatataacttgtgcttataagcacctatatggcggtgtagctcagctggctagagcgtacggttcatacccgtgaggtcgggggttcgatcccctccgccgctaccatatatatatggcccgttggtcaagcggttaagacaccgccctttcacggcggtaacacgggttcgaatcccgtacgggtcatcaagcgaatcggcttctgttgcagaagccggttttttcatatttagacaactttttgagaaatgtcggaggaaatacgaaaggaaaggggaacaagggagaaagcgtcgaagagttctttggaattgttaccttcttttgacaaaatcctatctgggctttcatttataatgacaagcaacgaataaaacaggtgggggatgagagcaatggaaaaagcggaaagaagagtgaacgggccaatggcgggacaagctctggaaaaactgcaatcgttttttgaaaaggcggcaaagcttacagtccatcaagcgcattcactttttttctataagggtttcatttatgtcgtgatcggttttttacttggacgggctttcatattatctgaggttcttccgtttgcgctgccgtttttcggagcgatgcttttgatcagaagagataaagccttctatgcttgtctgtctttacttgcgggcgctttaaccatttcgccgaaacactctttattgattctcacagctttggccgtcttcactctattttcaaaaatcggtacatatatcgtgcaggaccgggtgaagatgctgccgatcgtggtgtttttctctatggctgccgcgagaatcggatttgtttattttgaaaggggcgcttttaccacctatgattatgtgatggctgttgtcgaggcgggtctggcctttattttgacgctgatctttttgcaaagcctgccgatcttcacgatcaaaaaagtgaagcaatcgttaaaaatagaagaaatcatctgttttatgattttgatcgcatccgttttaaccgggcttgccggtgtttcatttcagggaatgcaggctgaacatatcctggcccgctatgtcgtgctgagtttttcctttgtcggcggggcaagcatcggctgtacggtcggtgtggtgaccggactgatcctcgggcttgcgaatatcgggaatctctatcaaatgagtctgcttgcgttttccgggcttcttggcgggctgctgaaagaaggaaagaaagccggagccgcagtcgggttagtgatcggctcactgctgatttcattatatggagaagggtctgccggattaatgaccactctttatgaatctttgattgccgttgttttgtttttgattacgccccaatcgattacgaaaaaggtggcgcgatacataccgggcacggctgagcacagtcaggaacagcagcagtacgcgaggaaaatcagagatgtcaccgcccagaaagtagaccagttctccaatgtgtttcatgccttgtcggagagcttcgccacctttcatcagacgtcttctgatgagcaggcggaagaaggggaagtggatctctttttaagcaaaatcaccgagcattcctgccaatcctgctataagaaaagcaaatgctgggttcaaaactttgataaaacatatgacttaatgaaacaagttatgcatgaaacagaagaaaaacagtatgcctcaaaccgcagattaaaaaaggagtttcaacagcactgttccaaatccagacaggtggaagagctgattgaggacgaacttgcccaccatcacgcccatctgacactgaagagaaaagttcaggacagcagaaggcttgttgccgagcagctgttgggggtttctgaggtcatggcggacttttctcgggaaataaaacgggagagggagcagcattttattcaggaagaacaaatgatagaggcgcttcagcatttcggaatcgagattcagcatgtcgagatatacagcttggagcagggcaatattgatatcgaaatgacaatcccgttcagcggaggacacggcgagagtgagaaaattatcgccccgatgctgtctgacattcttgaggagcagatacttgtcaaaagcgaacagcactcgactcatccgaatggctacagccatgtcgcgttcggttcgaccaagtcgtaccgggtatcgacaggcgcggctcatgcggcaaaaggcggcggccttgtctccggagacagctacagcatgatggaactgggggcgagaaagtatgcggccgcgatcagtgacggcatgggcaatggggcgagggcccattatgagagcaatgaaacgattaagctgctcgaaaaaattctcgaatcaggtattgatgaaaaaatagcgatcaaaacgatcaacagtattctgtctttacggacgacagacgaaatctactcaactctcgatctttctatcattgaccttcaggatgcaagctgcaaattcttgaaggtcggttcaacgccgagttttatcaagcggggagatcaagtcatgaaagttcaggccagcaatctgccgatcggcatcatcaatgaatttgatgtggaggttgtaagtgaacagttaaaagcgggagatctgctcgtcatgatgagtgacggtatttttgaagggccgaagcacgttgaaaaccacgacctgtggatgaagcggaaaatgaaagggctgaaaaccgaagatccgcaggaaatcgctgatatattaatggaagaggtcatcagaacgcgttccggccaaatcgaagacgatatgacagtggttgttgtccggattgatcacaacacgccgaaatgggcttccataccggtgccggcggttttccaaaataaaaaggagatttcttaatccattcgtataaatcactttccttctggcgaagatgggactaatcgtatcaccgggaggaatgtatgtgaataagggacatttaaatcaagttctgctgattacagatggctgctccaatcatggtgaagacccgatcgcaatggcggctttcgccaaggagcaggggattacggtgaatgttataggaattatggaagaaaacgcgattgaccaagaggcaatgaaggaagttgaaggcatcgccatggccggaggcggcgtccatcaagttgtgtatgcgtcacaattgtctcagacggttcaaatggtgacgaaaaaagcaatgacccagacgctgcaaggtgtcgtcaatcaagagcttaaacaaatattagggaaaaacgttgaaatggaagagctttctcctgaaaaacgcggcgaagtgatggaagtggttgatgaactcggcgaaacggttcatctgcaagtgcttgtgctggttgatacgagtgcgagtatggcgccgaaactgccgacggtgaaagaagcgctgatcgatctttccatcagtttaaattcccgggccgggcaaaatgaatttgccatgtgtatatttcccgggaaaagccaggaagttgagcttgtgctgaattggacgccgaagcttgaatctctttctgcactctttgcgaagctgtcgaccggcggtatcacccctacgggccccgctatccgggaagcgacgcagcagtttgagagaatccgctcaagaaggagcatgttggcagatgatgaacgacgctttaacgagtttggcatgtagtctggcaccggggacggcaattcagggcaaatggaacggcaaatcctacagattgctcaaacagcttggaaaaggggctaacggtattgtatatctggcagaagcatcaggcggacaggtcgctttgaaaataagcagcgacagcatgtctgttacctctgaagtgaatgtcttaaaatccttttcaaaggcccggtcgcaaacgatggggccttctttttttgatgcggacgacgcgtttattccgcagctgaataaaaatgtctctttttacgtgatggagtacatagaagggccgcttcttccgcaatatatcagcagtaagggagcggagtggattccggtgctgatggtgcagcttctttccagcctgtcagtccttcatcagcagggatgggtttttggcgacctcaaaccggaaaatctcattgtaaccggaccaccggctgccattcgctgcattgatgtagggggaacgacaaaacagggccgcgcgattaaagagtatacggagttttacgacaggggctattgggggtatggaacaagaaaagcagaaccatcctatgacctgtttgctgtcgcaatgatcatgatccactgtgtccagaagaaagagtgcaaaaagtcaggacagccgaaagaacagcttcgttctatcattgaaggccacccgtttctgaataagtataagaaggttctgttttctgctttaaacggccaatatccgtctgcggaagccatgaagcatgacatcctgacggcggggcagagcgccgggagcaaaaggaaagccgccgccaagcctaagccgccgcaatcaaaaccgcggcagggcactgtatctcaaacgcggtataaacctaaacaaaaacccgcaaagcacaatggtttgtttgaaacaacacttattttaatcagtgttctcgccctttatttcgcttacatcgtcttttttctcatctagtgccggccggacgcctgcgctcatgcttcttctttgcttggagggaatgaaagtgataggatatgtatatctttaaaaaacctgctcattgtgagggggacattgtgaaaagcgtggaagattttttcaaaacatatcatcttcaggcggagggagaaacgattattgccggggtctccggaggccctgattcaatggcgcttctcagtatgctgaataagcacttcgggcattcctccgttatcatagcggcgcatgtcgaccatcagttcaggggtcctgaatctgaagaagatatgaagtttgtgcagtcatattgcgaagcggaacacatcctctgcgaaacggtacagattgatgtttctgcatacgcaaagaagaataggctgaacaagcaggctgccgcgcgtgattgcagatatcagtttttcgaagatctgatggcgaaacaccaagcgaagtttttggcgctggctcatcacggcgatgaccaggttgagacaatgctcatgaggcttgcgaaaggtacgctcggggcagggcttgcgggaatgcagcccgtccgcgaatttgcatccggctggctgatcaggcctttcctctatgcggcaaaggatgaaatccttgaatactgccgtcaagaagggctcagctacagaacggatgagagcaatgcaaaagacgattatacaagaaacagattcagaaagaccgtgcttccttttttaaaacaagaatcacctgacgttcataaaacgtttcaaaaggtgagtgaagcactgacagaagacgaacaatacctgcagtcattaacgaaagaacgaatgaataaggttattacaagcaagtctgacacatcggttgaagtcaattcctctcaattgcttgcccttccgatacctttacaaagaagaggagttcaactaatattaaactatctttatgaaaacgttccatcgtcgttttccgcccgccacatacagcagtttctcaaatgggcgggaaatggaagcgcctcgggagtgcttgattttccgaaagggctgaaggtggtcaaatcatatcagacatgtttgtttacatttgaacaatggcaatgtgaaaaagttccctttgagctgcagctgcaaggagcggaaggcgagactgctgttctccccaacggctttatgatagaggtggccgttcaggctgaccctcatatcaaaaatgggaatgctgtttttatgacaagcagaaacaaggtgcaatttcctttaacaatccggacgagaaaaatcggcgaccggatcaaacttaaagggatgaatggctcgaaaaaggtgaaagatatatttattgatcataaactgcctctgcgggatcgggacgaatggccgattgtaacggatgcgagcggtgaaattatctggctgcctggcttgaaaaaatccatctttgacgatcttgtgatttcaaacagtgaccgcattgtattacaatatagacagcatgaaaagtgtagggggcaagcattaacatgaaacaggatatcgaaaaagtgctgatctcagaagatgagatccagcagaaagtaaaacagcttggagaacaattaacaagcgagtacagcgacacgtttccgttggcaatcggtgtgttaaagggagcgcttccttttatggctgatcttataaagcatattgatacatatttggaaatggacttcatggatgtatcaagctacggaaattccacggtttcttccggagaagtcaaaatcatcaaagatttggatacatctgtagaaggccgggacatcttaatcattgaagatattatcgacagtgggttaaccttgagctatctcgtagaactcttccgatatcgtaaagcgaaatcaattaagattgttaccctgttggataaaccaagcggaagaaaagcggacattaaagcagacttcgtaggctttgaagttcctgacgcgtttgttgtgggttacggacttgattatgccgaacgctatcgcaatctgccttacatcggagtattaaaaccggcgatttatgaaagctgatcggctgcctgcttccgagatggttatcggttgtattggaatgattttctatggtactattgaacatagttgtgcttactgtgggaggaggtaaggaatgaatcgggtcttccgtaataccattttttatttacttattttattagtagtaatcggggttgtgagttacttccagacttcaaacccgaaaacagaaaatatgtcgtacagtacgtttatcaagaacctcgatgaggggaaagttgatagcgtatcggttcagcctgtcagaggtgtttatgaggtaaaaggacagctgaaaaaatacgacaaagaccagtactttttaacacatgttcctgaaggaaaaggagcagaccagatatttgatgcaattaaaaagacggacgtaaaagttgatcccgcacaggaaacaagcgggtgggtgacgttcttaacgacgatcattccgtttgtcatcatctttattctgtttttcttcctgctcaatcaggctcagggcggcggcagccgtgtcatgaacttcgggaagagcaaagcgaagctgtatacggaagaaaagaaacgcgtgaagtttaaagatgtagccggcgcggatgaggagaagcaggagcttgttgaggttgttgagtttctgaaagatcctcgcaaattcgccgagcttggcgccagaatccctaaaggcgtgctgctggtcggacctccgggaaccggtaagacattgcttgcgagagcctcagccggtgaagcgggcgttcctttcttcagcatcagcggatctgacttcgttgaaatgtttgtcggtgtcggtgcttcccgtgtgcgtgatttattcgaaaatgcgaaaaagaatgcgccttgtctgatcttcattgatgagatcgacgcggtgggacgtcagcgcggcgcaggtcttggcggcgggcatgatgaacgcgaacagacgctgaaccagctgcttgtagagatggacggtttcagtgcgaatgaaggaatcattattatcgctgcgacaaaccgtgcggacattctcgaccctgcattgcttcgtccgggacgttttgaccgtcagattacggtagaccgtccggatgtcatcggccgtgaagccgtattacaggtccatgcgagaaacaaaccgcttgatgaaacggtgaacttaaaagcaatcgcttcaagaacacccggtttctcaggcgccgatttagaaaaccttcttaacgaagcggcacttgttgctgcccgtcaaaacaagaagaaaattgatatgcgcgacattgatgaagcaacggaccgtgtcattgcgggtcctgcgaagaagagccgcgtcatatcgaaaaaagaacgcaatatcgtggcgtaccacgagggcggtcacaccgttatcggacttgtgctggatgaagccgatatggttcataaagtaacgatcgttccgagggggcaggcgggcggatacgcggtcatgcttccgagagaagaccgttacttccagacaaaacctgaacttctcgataaaattgtcggtcttctgggcggacgggttgccgaggaaattatcttcggcgaagtcagcacgggggctcacaatgactttcagcgggcaacgagcattgccagaagaatggtgacagagttcggtatgtcagaaaaactcggaccgcttcagttcggtcaatctcaaggcggtcaagtatttctgggccgggatttcaacaacgagcaaaactacagtgatcagatcgcttacgaaatcgatcaggaaattcagcgcatcattaaagaatgttatgagcgtgcgaaaaccatcctgactgaaaatcgcgataagcttgaattgattgctcagacattgcttgatgtggaaacattagatgcggaacaaatcaagcatctcgtggatcacggaaaactccctgagcgcaatttctcagatgaccatcttcaaaaagacgatgtgaaagtaaacatcctgtctaaaacagaagacgaaaagaaagacgagccgaaagaatagttcgctttctgatatgaaaaccgccggcgtataccggcggtttttttactggttccgttttgtttacaaaagagccgcagatcgtgtatggtattgtagaatgttgaaaatgttatgattagaaactattcaaaagtggtgatagaggttgttactggttatagatgtggggaacaccaacaccgtgattggtgtatatcatgatggggaattagaatatcattggcgcatagaaacgagcaggcacaaaacagaagacgaattcggcatgctgctccgttccttatttgaacattccggactcatgtttgaacagattgaagggattatcatctcatccgtggtgccgccgattatgttctctttagaaagaatgtgcataaaatactttcacatcgagccgcaagttgtcggcccgggaatgaaaacaggtttaaatataaagtatgacaatccgaaagaagtgggagctgacaggatcgtcaatgccgttgcggcgatccagcagtatggcggccccttaattgttgttgatttcggaactgcgacgacgtattgctacattgatgaaaacaaacaatacatgggcggggcgattgctcccggcattacgatttcaacagaagcgctgtactcacgtgcggcgaagcttccgagaattgaaattgcccgtccggacaatatcatcggcaaaaacacggtaagcgccatgcagtccggcatccttttcggctatgtcggacaagttgaaggtatagtgaagcggatgaaatggcaggcaacacaggaaccgaaagtcattgcgacaggcgggcttgcgtcattaatcgcaaacgaatcagactgtattgatattgttgacccgtttctcactctgaaagggctggaaatcatttatgagcgaaatcgcgtgggtcacgtataggaggtaaacgatggattatttaattaaagcaattgcatatgacggtaaagtgcgggcttatgcagccagaacgacagatatggtaaatgaagcgcaaagaaggcatgacacgtggccgacggcatcagccgcaatcggccggacgatgacagcttctctgatgctcggagcgatgcttaagggtgaagataagctgacagtcaaaatagaaggcggcggcccgatcggagccattgtcgcggatgcgaacgcaaagggtgaggtaagagcatacgtatcaaacccgcacgttcattttgacctcaatgaacaagggaaactggatgtcagacgggcggtcggaactgacggaacactcagtgtcgtaaaagatttgggcttgcgtgattattttacgggacaagtagagattgtctcgggtgaactcggtgacgacttcacgtattaccttgtttcttctgaacaagtcccttcatctgtcggcgtaggtgttctagtaaatcctgataacaccattctcgctgcgggcgggttcatcattcagcttcttccggggactgatgaagaaaccatttcaacaattgaaaaacaattatctcaaatcgaaccgatttcaaaattgattcaaaaaggcctgacaccggaagaaatcttagaagaagttcttggtcaaaaaccggacgttctcgaaacaatgccggtcaaatttcactgttcttgttcaaaagatcgattcgaaacggccattttaggactaggcaaaaaagaaatacaagatatgatagaagaagacggaaaagccgaagcggtttgccatttttgtaatgagaaatatttatttacaaaagaagaactggaagagcttcgtgacgaaacaacccgctagctctttagcgggttgttctattttataaaagggatggggtagattttgaaatcgagaacacttttgacgattattgtagcggcgctgttagtatgcagtgtgacagtggcgtataaattaacaaaatcccaagccgcagggtcatctgaagaatccatcgcgacaatcggtgataaacatatcacacggcaagactggatgaaaaagatggaagacgagtacggaaaatcaactctggaagacatgattaatgcacaagtagtggaagagcttgcgaaaaagaataaactcacagtttcaaacagcgaattggagcgggagtttcttttaatcaaagcggtgaataattcattttatgaagacagccatattaccgaaaaagaatggagagaccagatccgctacaacattcttcttgaagaactgctgacgaaggacatcgatatatcggataaggaaatgcaatcattttataataaaaacaaagaattgtaccatttcgatgattcctacagaatccggcacatcgtcgtcaaaaacaaagatgaggcggacagggtgcttgctgatttgaaaggcggttccagctttgaagccgttgccgctgagcgttccacggacagatacacgtcacagtatggcggagacctcggctttgtgacagaaaaccaggaaaatatcccgcaggcatatatcacagaagctaaaaatcttaaagaagatgaatggtccgctgagccgattaaagtttcttcaggatacgccgtcattcagctgaaagaaaagcttaaagcgagaactttctcatacaatgaagtgaagagccaaatcagacgccagatcgcgatggatcaattaggtgacaaggcgacagttaaaacgctgtggaaagaggcgggggtctcttggttctacggggaaaaaagaactaaatgattgacaaaaaattttgaaattgataacttatatttataataccaataaatttagtcggaaattgaggtgtcaaacatggtgcgtattgcaaattctattactgaactaatcggaaatactcctattgtgaaattgaatcgcctgacggatgaaaacagtgcagatgtatatctgaagcttgaatacatgaatccgggcagcagcgtaaaagaccggatcggagtggcgatgatagaagcggctgaaaaagaaggaaaattaaaagccggcgacacaatcattgaaccgacaagcggaaatacagggatcggtcttgcgatggtggcagcggctaaaggtctcagagccattctcgttatgcctgatacaatgagtatggagcgacgcaatctgctgcgtgcatacggagcggaacttgtgctgactcccggcgcagaaggaatgaagggcgccattaaaaaggcggaagaacttgccgaggaacacggatactttgtgcctcagcaattcaacaatgcggcaaacccggaaattcaccgccaaacgacggggaaagaaatcgtagaacagtttggtgacgaccagcttgatgcgttcgtggccggaatcggtaccggcggaaccatcacgggagcgggcgaagtgctgaaagaagcatatccatccatcaaaatctatgcggtagagccggcggattctccggttctttccggcggaaaaccgggcccgcataaaattcagggtatcggagcgggatttgtccctgaaacattgaatacggacatctatgatcagatcattcccgtcaaaaacgaggatgcatttgaatatgcccgtaaaacggcaaaagaagaagggattctcggcggcatttcttccggagcggccatttacgcggcactggaaatcgcgaaaaaactggggaaaggcaagaaagtgcttgcgatcatccctagtaacggagaacgttacttaagcacaccgctttatcagtttgaatagagacatacacacggctcccggctgtatccgggagtttttttgtgcctgaagcatcgaaaatccaaaaaacgtttcgaattttatggttggaagtgaaattcacttttttcaccagtgtgattgctttaaaataaaactacagtaaaacgaagcagaggattgatatgatggcacaacgcagaccggcaggaagaaaaataccttttacgaaacaagcatttttacagcgatatgaaaacctttcgaaatcgagaaaacggcatgttctgctcgaaagcgcgagagggggaagattcagtatagccggtctagatccgattgcgtccgtcagagggaaagacggaattacaacgatcaagcatgagggggagacactgtttaaagaaggtgacccgctgcgggcctttcatgaatggtttggaacgctcggaacggaaacaaacgttgagtttccggactttcagggcggtgcgattggttttatcagttacgactacgcccgatatattgagaattttaagatgctgtcgttagatgatctggaaacacctgatatttactttcttgtttttgatgatgtggccgtttatgaccatgaggaagaggcgttatggctcattacccatactgaaacggaagaagcggatcttgcggaagaaaagctgtccggcttagaggacatgtggtgctccctccaaacggcggacgagcctttttcaccgctgaatcggaatggggacggatcgtacgccgctccgttcactgaagaaggattttcgcaggctgtagaacaaattaaacaatatatcgcgagcggcgatgtgttccaggttaatttgtccatcaggcagtctcagtccttatccgttcatccgtatgaggtgtataaacacttgagaaacgtcaatccgtctccttacatggcctatctcgagacaccggggtttcaagtgatatgcgggtcgccggagctattggtgacaaagaaggggaagaagcttgaaacgagaccgatcgcgggtacgcgttcaagaggaaaagacgatgctgaagacaaggccttggctgaggaattaattcacaacgaaaaagaacgtgcggaacacgtcatgcttgttgatcttgagcgcaatgacctcgggcgcgtatcgcgctacggctccgtgcgggttaacgaatttatggcgatcgaaaagtattcccacgtcatgcatatcgtgtcaaacgtacagggagagctgcaggacggatatgacgcgacagacattattcatgcggtgttcccggggggcaccatcacgggagcgcccaaagtgagaacgatggaaattatagaagagcttgagccgacaagacgagggctttatactggatctataggctggttcggattcaacggagatttgcagtttaacattgtgatccggacgatctatgcagccggcggacatgcttttatgcagtccggtgcaggagtggtcattgattcggttccgaagcatgaatacaaggaatcgttcaaaaaagcttttgcgatgaaaaaggcgttagagctgagcgaagaagagacaaaaaatcagacgaggtgagcagagatgattttaatgattgacaattatgattcatttacgtacaacttggttcaatatttgggtgagcttggggaggaactgatcgtcagacgaaatgacgagattacgattgagcagattgaagagctgggtccggacttcttaatgatttcaccggggccgtgcagtcctgatgaagcggggatcagcctcgaagccatcaaacattttgccggcagtattcctattttcggcgtatgtctcgggcatcaatcgattgcgcaagtattcggcggcgatgtcgtcagagcagagcggctcatgcacggcaaaacgtcagaagttattcatgacggacagacgatttttaaaggcctgcaaaatccgctggtcgccacccggtatcattcacttattgtcaaagcggacacgctgccggattgttttacagtatccgctcaaaccaaagaaggagaaattatggcaatccgccataatgagctgcctgttgaaggtgttcagttccatccggaatccatcatgacctccttcggcaaagagatgctcagaaactttatagagacacaccgcaaaaaggaagtgacggtgtgattatatatttgaatggtcaatatatagaggagaaagaagcggcgctttctccttttgaccatggttatctgtacgggatcggcgcgttcgagacgttcaggctttacagcggccggccgtttctgccggatgcgcatgtcgccaggctcaacagggcgcttcgggatctgcagattgcatatgaggtgaacaaacaggagctgcttgatatgcttcggagactgttgctcctcaatgacataagggacggcagcgcgcgtgtccggcttaacatctcggcaggcgtcagcgataaagggtttgccgcgcagacttatgaaaagccgaccgtcctttgtttcgtcaaccggctcaatccggaaactctgcctgttcaaaaagaaggcaggcttctctctatcaggagaaatacgcctgaaggatatttccggttaaaatcccatcactatttaaacaacatgtatgctaaacgggagatcgggaatgatcccaagcttgaaggcattttcctgaccgaagaaggagatgtcgcggaaggcattgtctccaacgtgttttggcgaaaaggagacaaggtctttacgccatccttggatacgggaattctcgacggtgtaacaagacagtttgtcattgatgaattgaaacggcaggggacagaagtcaccgaaggccgattccgttttcaatcaatgcttgaagcggatgaagcatggttgacaaactccgtgctcgaaatcatcccgttttctaaaatagaggaagttccgctgcccggagtgagcggaaaaacggtgcaattgctccgtaagcagtatcagcaggaaataaacaaaatgaatgtacaggagggggaacaaaatggcgcagcaaacaattgaacagcctaaactgattcatacaaaaaaaggcgctctgtcctataaagagaagacgctcattatggggatattaaatgtaacgccagactccttctctgacggcggtaaatacgacagtacggaaagggcgcttctgcatgcggcgaagatggctgaagaaggggcgcatatcatagatatcggcggcgaatcgacaaggcccggcgcatcactcgtgtcggctgatgaggaaatgtcgcgagtcatccccgtcatagaacggattacaagcgagctggacattccgctttcaatcgatacgtacaaagcgtccgtggcagacgaagcggtcaaagcgggagcctctatccttaatgacatctggggggcgaaaggtgaccctgatatggcgtcagtagccgccgcacacggggttccgattatcttaatgcataatcgcatggaaagaaactacaacgatcttattcctgatatgcttgcagacttgatggaaagcgtaaaaattgccgcagaagccggcgtcacagatgaaaacatgattctggatccggggatcggctttgcgaaaaactatgaggacaatctggctgtcatgaacaagctggaggtgttcagcgggttaggttatccgctgctcctggcgacatcgagaaaaaggttcatcggccgtgtgcttgaccttccccctgaagaacgtgccgagggaacgggagcgacagtatgccttggcgtccagaaaggctgcgacattgtgagggtgcacgatgtcaaagagatcgcaagaatgactaagatgatggatgctatgttgaacaaaggaggcgtacattatggataaagtatatgtagaaggtatggagttttacggatatcacggcgtattcgaagaagaaaacaaactcggccagcgcttcaaagtagacctgactgccgaactggatttaagcaaagcgggaaaaacggatgacctttcttataccattaactatgcggaattgtacagtgtctgccgcggcatcgttgagggcgagcccgttaatttggtcgagacccttgcggaacggatcgcagacaccgtccttgagaaatttgagccggtgcatcaatgtacggtaaaggttgttaagcctgacccgccgattcccggccattataaatcagtagccatagaaatgacgagaaagaaatcatgaacaatacggcatatatcggcctcggttccaatatgggcgaccgtgaacattatttgcgtcaggcagtggccatgctcagccgtcatcatggcgtgacggtgtcaaaggtgtcctccatatatgaaacagatcccgtcggctatgaggatcaagatcagtttcttaatatggcggttgaagtgaaaacgtcgttatctccttttgaacttcttgacgtaacgcagagcattgaagctgaattaggcagaacgagagagattcgctggggaccgcggacggcagaccttgacattttgctgtataatcgtgaaaatattgaaacagagcggctgattgttccgcatccgagaatgtatgagcgcttatttgtccttgcgccgttaaaagaaatatgtccgcaggcggatcatatcacggtaagcgctgaaacaaaccaagaaggtgtaagagtatggaagcagaaatctggggtaggcgaattcgtgcattcagaaagctgaaaggttatactcaagaaggatttgcaaaagcattaggtgtatcagtttctattgtcggtgaaattgaacgcggaaaccgattgccgtcagatgccatcattcaagatgcggcagatgttttaaatataagtgcggacgaattggccccgcctgaaaaatagacaaataatgaaaggaggggaaaaatgtttaaaatcggtgatattcaattgaaaaaccggatcgtgcttgcccctatggccggtgtctgtaactcagcgttcagattgactgtaaaggaattcggagccggattggtatgcgctgaaatggtcagtgacaaagcgattctttacaacaacgccagaacaatggggatgctttacattgatgaacgtgaaaaaccgctcagccttcagatttttggagggaaaaaggaaacccttgtggaagcggcgaagtttgtagatcaaaacacgactgctgatattattgatattaacatgggttgtcccgtacccaagattacaaaatgcgatgcgggcgccaaatggctacttgatcctgataagatttatgaaatggtatccgcagtagtagatgctgttgataagccggttacagtgaagatgagaatgggttgggatgaagagcacatttatgcggtgaaaaatgcccaagccgttgaacgtgccggcggaaaagccgttgccctgcacggccgcacaagagtgcaaatgtatgaaggcactgcgaactgggatatcattaaagaagtgaagcaatccgtctccattcccgtcatcggaaacggtgatgtcaaaacgcctcaggacgcgaaacgtatgcttgaggaaacaggagttgacggcgtcatgatcggccgggccgcactcggcaacccgtggatgatttaccgtacggtgcactaccttgaaaccggtgagttaaaagacgaaccgaaagtccgtgaaaaaatgtcggtatgcaaactgcacttagaccgcctgattaagttaaaaggcgaaaatgtggcagtcagagaaatgagaaaacacgctgcctggtacctgaaaggtgtcagaggcaatgcgaatgtacgcaacgaaattaaccaatgtgagacgcgtgaagaagttgtgcagcttttagatgcatttaccgccgaagcagaggcaaaagagcttcaagatgcaaaagtaggttaatatacaccctctattgctgctcactgccagcttgccgctggcagtttttctgctttttcgtgaaaacaaaatgtaacggagtgataccaatgagtcaagaagagcaaaatcatgaggaattgaacgaccagctgcaagtcagacgagataaaatgaaccagctgagagaaaacggcattgaccctttcggcgaacgtttcgagagaacgcatcaatctcaacagatcattgacgcctaccaggagctttctaaagaagaactggaagaaaaagcgatcgaagtgaccattgcaggccgtatgatgacaaagcgcggaaaagggaaagccggctttgcgcatctgcaggacttagaaggtcaaattcaaatttacgtaagaaaagacagtgtcggcgaagaacaatatgaaatctttaaatcttcagacctcggagacgttatcggcatcacggggaaagttttcaaaacaaacgtaggcgagctttctgtcaaagcgacatcttttgaactgctgacaaaagcactgcgtcctcttcctgataaatatcatgggttaaaagacgttgaacagcgttaccgccagcgctatctcgatctcatcgtaaaccctgacagcaaacaaacgtttatcacacgcagcaaaatcatccaagcgatgagaagatacttagatgaccatggatacttagaagttgaaacacctacgatgcacagcataccgggaggagcgtctgcacgcccgttcatcacgcaccataacgcgctcgacatgcctctttatatgcgtattgcgattgaactgcacctaaaacgcctgattgtcggcggattggaaaaagtctacgaaatcggccgtgtgttccgtaatgaaggtgtttctacacgccataaccctgaattcacgatgatcgagctgtatgaagcgtacgccgattataaagatattatgagtcttacggaaaacctcgtagcacatattgcgcaggaagtgcttggaagcaccacaatccagtacggcgaagagcagattgatctgaaacctgaatggaaacgactccacatggtagatgcggtcaaagaagcgacaggtgtagatttctggaatgagatgactgttgaagaagcgcgcggtcatgcaaaagagcatggtatcgagatcacaaactcaatgacggtgggtcatatcatcaatgaattcttcgaacaaaaaattgaagaaacactcattcagcctacatttatttacggccaccctgtagagatttctcctcttgctaagaaaaatccggaggaccctcgctttacagaccgttttgagctgtttatcgtcggccgtgagcacgctaatgcgtttacggagctgaatgaccctattgaccagagggaacgctttgaagcgcaattaaaagaaagagaagaaggaaacgatgaagcgcatatgatggatgaagacttcgttgaagctcttgaatacggcatgccgccgaccgggggattgggtatcggtatcgaccgccttgtcatgctgttaacaaatgctccgtctatcagagacgttttattattccctcaaatgagacaacgctaataaaagggaaggcgccgtttctgcttatcgcagtacggcgcttttttagaaacaagccgctcgtaaaacttttttgattttcttttaaaaaactattgcactattatttgcgaggtggtatattattattcgttgccgctaaacaaggcgctgacgaaaaaaagaaatttaaaaagttgttgacttcaagagattgataagatataataataaagtcgcttggacgaaagacaaaatgatctttgaaaactaaacaagacaaaacgtacctgttaattcaaagttttaaataaatcgcacagcgatgtgc

SEQ ID NO: 39 - DNA, 31021 bp, Bacillus velezensis
  source 1..31021: mol_type = genomic DNA
ttacggcaaaaatgagccgtcacttgaagtggcgggaatttgggtggaaccgcgggtctgacacacactcgtcccttgctttgggatgagtgtgttttttattttattaaaaataaaggagagatcagaccgtgaagaagccgcacattgtgattacttttcctgatgggaaacaaaaaaaataccggaaagacgttacgttagaagagatcgctcaatcaatcagtccgagtctgaaaaaggcgtctgccgccggaaaggtaaacggatcgttatatgaccttagaagaagcattcataaggatgcggcgattgaactgtgcagttttcagtctgaagcaggactggaagtgatgagacacacagcagcacacgtattggcgcaagcggtaaaacgtctgtatccgaaggtttgtttagggattggacccgttattgacaatggcttttattatgactttgatatggatgaaacgattactgaaaaagacctggccgtcattgaaaaagaaatgaaccgaatcatttcggaaaatccggaaattatcagagaagaaatctccagagaagaggcagagcagctgtttgctcatgaaccgctgaagcttgagctcttagcgggtattccgcagactgatacaatcagtatataccgccagagcgaattcattgatttatgccggggtccgcacttggcgtctgccggacagataaaagctttttcgctcactcatgtatcaggggcttattggtgcggcgacagcaaccaaaaaatgctccagcgcatctatggaaaagcattttcctcagaaaaggagctgaacagacattttcaggtgttgaaagaggcggagatgagaaatcatcggaaattgggagcggagttacaactttttatgttttcggaagaagcgccgggtatgcctttttatctgccgaacggtcagtttatccgaaacacgcttgaatcatttctgcgttcaaagcaggatgactatcattatcaggaagtgcgcacccctatgatgatgaaccagcgtctttgggagcaatccggccactgggatcattataaagagaatatgtatttctcagaagctgatcatcagcgcttcgcgttaaagccgatgaactgccccggccacatgctcatatttaaagaaaagcttcgttcttatcgtgatcttccgattcggatggctgagttcggtcaggtgcaccgtcacgaattcagcggggcgcttaatggcctgctccgcgtcagatctttttgccaggatgacgcacacatttttgtaacgcaggatcagatcgagagtgagatcgcttcggcgctgcagctgattcacgaggtgtacaccgcatttggtttttcctatgatattgagctgtcaacaagaccggaagattacatgggaagcgaacacttgtgggacagggctgagagcgcattagaaaaagtattaaaagaacagggatatcgttttcggtttaatcggggagatggtgcattttatggaccgaaaattgatattcatataaaagatgcgctgaaccggagccatcaatgcgccactgtccaactggattttcaaatgccggaaaaatttgatttaacatatattgatgaaaaaaaccaaaaagtccatcctgttgtcattcaccgggcggtattcggatctctcgacagatttctcggaatcattacagaacatttcgggggagcgttccctttatggcttgcaccggtacaggcaaaaatcatcccagtatcaaacaccgcacaccgggactgcgcagaacaggtgcacctgcaaatgaagaaagcgggtatccgggctgagctcgatcagcgcgatgaaaaactcggctataaaatcagagaagcacaaatgaaaaaaataccgtatattgcggttgtgggggatcaagagtgccgccatcaatctgtacatgtacggcaatacgggcgggaagacacatttgaagagaatgtgagtgattttatttcccggatcataagagaggcaaaacaaaaaatagagatttaataaaaacaacattgacatatcgtaaaatcacgatataataaagcgtatgaaacctattgatgtttttaaagcgttgtctaatgagtcacggcttgagattttacaatggctgaaagagccggaccgtcacttcgcaccgcatgatggcattgatatgaatgagatcggagtgtgtgtcagccagatcaccgataagcttcagatgacacagtcaacggcttctcaatatctttccatccttcagcgggcgggccttatccaaacaaaacggattggcaaatacacctattataaaagagatgaagacgcgataaaggcgatggccgattattttcagcgcgaaatgtagggctgaatcctttagaagagggattcagtttctttttccgactacacatcgacatattgcgatttgtttctttttgttcaactctttatatcgatatatcacaatatatctttatataaatcatcaatgaaggagtgtgtcaggtgcaaaatacctggaagatttacattttggcaattattagttttttagtggggacgtctgaatatgtgatatcagggatgcttgataaaattgcaggttccttgggagttactgtggcagcggcagggcagctgattacgattttttcgcttgtttatgcaatcggaacgcctgtcatgatggcccttacagcaaaactggacagaaggaagctcatgatctatgctctggggctgtttgttatcgggaatatcatttctttccttgtgcagggattcggcttatttgcgggagcacgggtgattatggcgcttggagcaggaaccgtggtggtcaccgcgcttacgatcgcagcaaaaatcgctcccccgggaaaacaggcaagttctctcgcaaccgtcattatggggtttacggcggcgctcattatcggtgttccgatcggaagaaccgtgtctgaagctttcggctggaaagtggttttcgccggaattgcggcaattggaatcattgccatgcttattatacgtttcgcgttgcctgagataaaaggagataaaccggtgccgctcattcagcaattttctcttttgaagaaacgaaaggtggctgtcgggctggccattacgtttttttggctcggaggctattcggttgcgtatacgtacctttctccgtatttactgaacgtcactcatatcggcagcggaatactgagtacattgctgcttattttcggtgttgcaagtcttgccggttctaaagcaggcggtttcagcgcagacaaatggggggcgcgtatgacattaaccggcggaatggcgcttcatgctatcatgctcatgttattgccgtttgtgacacattctgcttttggagcggcggcagtgcttattttttggtccttcgccgcctggtcatcaggacctgctcagcagtatcatttggcaacgatggagcctgaatcatcgggtgtattacttggcctcaaccagtctgtgatgcagctggctatggcagccggggcgggcatcgggggcattgttgtcactcatctgtctcttgcgtcagtgacatggatcggatcagcgggtgttgtcatcgcgatgtgcggcgtgctttcgcttgcgtcattaacgtctgaaaaaacctcaactgaatacagtgcagaataaacaaaagccccgtttctcagcttgagaaacgaggctttttgtctagttattttttcaagtttacgccgattgcggctccgtttcggcttgagtcggcgactccggtgaaggtgccgttttcacggtcgatcaggatgctttgcacattaccgatatcaaccgggctgctgccgaatttatgccccatttcgttcagttttgtgcgggcatcttccggcactcctttttcatatcgataggatgtcatgctgtttgtgtaaattctcggctcttcgaccgccgctttcagatccatgccgtactcaactttgttcaggatcgtttgcaggacggaagaaataatcgttgctccgccgggggagccgacagtcaggacgggttcgttatttttgaataaaatagtcggagtcatgctgctgagcggacgtttattcggctgcacttcatttgcgccgccaggcaccgcatcgaagtctgttaactcattattcaacacaacgccgtatccgggaaccataatgccggaaccgaacagctgttcaattgttgtcgtataagatacgacattgccgaagcgatcagttaccgtgaagtgggtcgtttggccttcttgtttgtcagtcggctgctccacttgtttatagtttgcagaaccttcctgataggcccaaggatcgccggctttcggttttttattgactttatcaatatctatcagctgtctgcgggcattgatataatctggattcaagagacctttgagagggacgttgacgaattctgggtccccggcaaatgcagcgcggtcagcataagccaaatgcatcgtttctgcgagaagctgatatttttgccaagaacggatatcatattgagaaagcttaaaatcatccaagaggttcagcatttgcaacaggaaaacaccgcccgagcttggaggaggagcagttgcgatatgatagccctggtaatctccccagatcggttcgtcaattgtcacattgaagtttttaatgtctttttctgtcattgagccgccgaattcctgcactgtttccgcaagctttttggagaatgcaccgtcatagaatgcttttgtgcctttgtacttaatagctgtaaatgttttggctaagtctttttggacgagtgtgtctccttctttcagaggttctccgtccggaagaaacacgtcttttgcagcagtgtgtgataatttgtctttataatctgagatggcatcagctaaaaccgaatcgatcggaaagccttttgaggcaagtttaatggaaggggtgatgagttgtttcatggagcgtgtgccccatttgtcgagcgctttttcaagtccttttaatgttcccggaacaccgactgcagtccctttagtaacacgttcggagaaagggatggctttgccgttttcgtcaaggaacatatccggtgttgcgcctgccggtgcgcgttcccggctgtcgataatggtggtgtctttcgtcttcgcatcataaaccatcataaatccgccgccgccgattcccgacatcataggttcagttacgtttaatgcgaattgaatggcaaccgcggcgtcaattgcattgccgccttttttcagcacgtcggcaccgatttgtgaagcgagaggatgggcggtggcaaccatgccgtctttgccgacatctacctgtttgtagtcgtcataggaaaacgggtgtttcttagcctgagcgtgataagggatgcttccggccgcgagcaaagtactgagcagaacgataaaacagagattcataaactttttctttttcatagtctgcctcctttgttttccgcttacaattatagagtaagtaaaatgtgctgttttcacaagtgacaaacggaatagtccggtgtgcaaaaagccggagtttctgtgtgaatgtaatcagtcgcaaataggctaaatgggaaaccggactgaaaaagctgtgaaacaagcataaagacaaaaaataagctacaataaacaaaacagaattcactcacatgacatatgaaaggaacgtgagccatgtatttaacgatcaaagagaccgctgagtttaccagtcttcctgaagaatatgtgcacaatcttgttttgacgaataaaataagagccgtccatgacggacagcaatatttaatcaacaaggaacaatttcaaacccatcttgagcagctggaaaaatataaggaaatgattcaagaatttttacatgagccgcttcctgaagacattgatgtaaaagatgaagactaggacacaatttcatattgtgtcttttttttcattttttgatgtaaaagatgaagactaggacacaatttcatattgtgtcttttttttcatttttttcggttgctcacaaaaaaaacggatgctcagatttcattttaaggccgttgttttcattttttaataccttgagtatcaatttgtttaaaagcttgtcatcgggctgaaaacgatgtttttgaggaatttgttgaaactgcgtatctgattcaccttatgtaacactatgtatattatgttacataagaccctttaccctttatcattcaacaggtttcggctataatagtaacataatgctcaatatgttactttaccaattataaggggttttttgatgcatatcgtacagccgatccgaagtttggagaagatccaggaagtcaaacagtatttaatgaagaaaagtgatcgtgattattttttatttatttttggcatgaacagcgcactgcggatttctgatgttctgccgcttcgcgtgagggatgtaaggaacaaagaccatgtgtgggcaaccgaaagcaaaacgagaaagaaaagaaaaattctgatactggagtctttaaaggccgacatatacgcttatacaaaagacatgaaagaagatgactatttgtttaaatcgaaacggacgaataagcctatatcccggattcaggcatacagaatattaaaggaagcggctgccgcttgcgggttggaggaaatcgggacgcatacgcttagaaagacgttcgggtatcatttttatcagaggacaaaagacattgctgaactgcagaggattttgaatcattcttctccgtctattacaatgcgttatatcggaatagatgaagatacgacgagagccgcctataaagtgttcggagggctgtagacttgaaaaaaacggccgccagcgttactataatagaagcaggctctagtagcacagcggatagtgcagcagtttcctaaactgcaggtcgggagttcgaatctctcctagagcgttttttgtatgagataggcgcagattaataatgtcggtaaaacaaaaaccccctttgttatacaagggggttttgagttgaatattttgtaagaatctcgtggaaatgatgtgaaaaaagcccgctgtaagcaagcgggctttttcttatatgacagcatcaaattgattgactttccaagcgttgttttcttttacgaatgttacatcacgttttgctgacggagaaccgtcaagagtcggtacagtgaagcggtatgtttgagcgcttccttttttagaaagaagagtcatttttgcttttttccaattcaggaggttatctccgtcgccgacaggaacagccaatttgccgtcttttacagtgaagtggtaatctttgaaccctttgtcaatcgcttgctttgtaaaagcgggtgtcagatattttacggctttcgcttttgttccgaggtctttgcacataaatacatattgcagattttgatattcaaacggttcagatgtgcaatttgtgtttgatttaagagcaccgccgctcattgtgttccagaaatgttctctcgctgacagggccagctgaagtgcttgtttttgtgtaaggtcattaggtgaagtttttgcggtcgccgcagtgcccaatgacagaatcaatgtaatagtagtgaggaataatagccattttttcatgatataatctctccttcaatcaatctctttctcttatgttacaaatgttacaataattacggtaagattacaataccttttcagaaatattttccggactttttatttttatggtttatttccatgtaagacgtgagaaaaagataaagagtttcattgaacaaaaggtttttacaagctgtctgctgaataataaaatggaagaaaatcaaaaaaggagtcctacatatggaagtacaagatcatttagaaacagcggaaggccgcggccagtctgtctggcgatcgatgtcactgtttttagtgccgctgcttttaagcaatgtattgcaatctgtcggccaattggtcggaatggtatttgtcggaaggtggctcggagtcgatgcgcttgccgccgtatcgtctttttttccgctgttttttctgctgatctcctttacgatcggaatcggttcgggaagttccattctgatcgggcaggcttacggcgcgaaaaacgaagagaggatgaaggcgattgtcggcactacactgacttttacctttatgatcggtgttgttctggcagttgtcggcagtgtgtttacgcttgatattctgcggctgatgggaacgccggaaaacgtaatagatgtcagtgtccgatatgcgcgcattttgttttgcgcaatgccgctgatgtttttatattttgcgtatacgacatttttacgcggaacgggagattcaaagactccgttttatacgttaatcgtcagtacagtcataaacatcgggcttttgcccttattgattctcgggcttttcggacttccgaagttcggcatttacggttcggcgtatgcaaccgtaatttcaaacatcgtgacatttatcgtactcatggtttatttgcggaaaaggaaacatccattggcatttgaccggactgcgctccgttctcttaaaatggacaaaaagctgctcgcgcttttactccgtctcggtattccgtcgagcatcaatatgattctcgtgtcactttctgaaattgcggtcatttcatttgtcaatcattacggatcaaacgcgacggctgcttacggggtcgtcaaccaagtggcgagttatgtgcagatgccggcggtaagcctcggtatcgccgtttcaatttttgccgcccaatccattggcgccaatcaattcggccggctgaagcaggtcatcaaagtcggcatcggcctgaattatttgatcggcggggttttgattgtgctgatttataccttctcccggcagatactggctttgtttttaaccgatcaggatacactccacattgcccgcaatctgattatgattaccctttggagctatctgattttcggtcacgctcagattgtttcagcaacaatgcgggcgagcggtacggtgttatggccgacgattatcagcatttttgcgatttggggaattgaagtgcctgtggcctttattctttctcattatacgaatctcggcattctcggcatttgggtcggttatccggcggcttttgtcgtcagcctgctgctgcaatacggatattaccggtttgtatggaagaaaaaacagattacccggctgattcaataaggttttaccgcacatcgctcagttcatacgggcgatgttttttttagagaaggaaaatgagtttagaaaatggaattcctatacatgctagaaaacaaggaaagggcaggtgcttatgacgattgaacatacgacttatttaggggtttcagccattaaagcggagactgatcaggctgaatgcatcattgtgccggagtggggatcaaatgtcatatcgcttcgggataaaagaaccggtatgcggcttcttagagaaccggaaactgcggagcaattccgcgcaaaaccgatgctgtacggcattcccgttttattcccgccgaaccggattacggatgggtcgtttcgttttgacggccgcgcgtatcaattagagataaacgaagaggataaacataatcatattcacggctttcttcacaatcagcattggaaagcggcggcagcgaaagaagagggggatggaatgacagtcgaaacagaaattgatctttcaaagattccccgtgttcataaacaatttccgcacgatgtcattgtccggatgacctatacattaaaagacaatgtgtttacgcagcgggcgctgattatcaacaagggaacggaggcttttccttgggggctcggctatcattcaacttttgttttcaatgaagagcgttctcgtctatttttgacggctgaccgcatgtgggaattaaatgaacgtttcgtaccgacaggccgtttattggatgtgcctgataaagaagcgtttcgtcaggggatgtctttgaaaaataaacagtttgacgatgtttttctttcttccggacggaatggcggcaataacgaagctgttatttatcatccggatgagaaattatccgttttgtatcaggcagacacgtctttcaagcattgggtggtatataacggtgacggaaagcaggggtttgtcagtcttgagccttatacttccgttacagatgcatttaatctgaatcagcctgcatcactgacagggcttcagattctgaaaccgggcgaagaagcggctgcgtcatccaggatcaccattttgcatgacgaagaataggaaagaggcgggataacattgaaaacatatgtgaaacgcttgagcgcggtgattctgcttttgatcattgccgcagttccttatattgatgatgcggctaaggcggctgaacaaaaaaatactttacaaacagagctgcaacacattctggatgaagaacctgctttaaagggggcttcagcgggcgtcagtgtccggtcagcaaaaacaggggaggtgctgttcggcagccgggaagatatgcggctgaggcccgcatcactgatgaagctgctgacggcatctgcggcgctttccgttctcggagaagattacacctttaagacagaagtacgggcagacggcgccgtgaaaggaaaacagctgcgcggaaacctttatctcaggggaaaaggcgatccgaccctattggcttctgattttgagaagatggctaaacaggtcaaagccagaggcatccatgtcattaaaggagatctggtcggggatgactcgtggtatgacgataccaggtattcagttgatcttccgtggagcgatgaaggccaatattatggcgcgcaagtatcagctcttaccgcttccccaaatgaggattatgataccggaacggtgattgcggaaatcagtccggcgaaacagcctggtaaaaagccgcgcatttcgatttccccccatacggacatcgttcgtgtgaaaaatgaagtgaaaaccgtcgcttctgatgaaaagaaagaattgacggttgaacgggagcacggtggcaatgtgattacgataaagggaaccatacctgccggctcggcaaaggcaaaagaatgggcggcggtgtgggacccgtcgtcctatgctttagatttatggaaacaagcgcttactaaacaaggcataactgtaaaagggaaagtcagaaccgggcgaatgccgcaccgcacccagcttgtcacattccgtacatccatacctctttcagaattattgatcccgtttatgaaactgagcaacaacgggcacgccgaaattctgatcaaggaaatgggaaaagtgaaaaaaggggagggcagctgggaaaagggcttggacgtgatgaaatcggagcttaaatcgttcgggctgaatccggatgaattgattgcaagagacggatccggcgtttctcatgttaacggcgtatccgccggccaaatcggagagcttttgtatacggttcagaaagaaaagtggtacccggctttccttcgttcgctccctgtcgccggcgcaagcgacagaatgacgggaggaacccttcggaatcggctgaagggcaccccggcagagggcaaaattaaagcgaaaaccgggtcactaacatcagtcagttcgattgccggctatgcagacacaaaaacaggagatacgcttattttttccgtgcttcaaaacgggctgcttgacgaagatgacggaaaagacattgaagacaaaatcgcagtcgtgctggcaaatcaataagaagggccgaatccttagaggattcggcttttttgatgtctgtaaaacattatattgcgattatgaatcaatcttttcaaaaagtaatacggcatgacaccgatttttcatttttaaacgtaaaacttcttttcagaaggcaaaacctttttaaaagcgcaattaattatacattttattccttattatagtgtttaagaaccagtttacagtgtgcatacataccgttttacatggtataaagattatagaaatgaagaaatgaagtgagtaatatatactatattctaaaaaatgttagagaaaatttaattttttattgtgatttctaaaatatgttttaaaataatgctatatggatgatttagtcatatgctgtcgaaatttaattgtaattatttcactttcttatcctcttaaattgaagcggagggattccattgaagaacactgtttattctttaactcacgcccaaagaagagtgtggtttacggagctgctcgaaccgggcacaagtatctgcaatctcgcggcatgcgtcaaattcaggggggacatcgattttgacgtactgcgccatgctttagatttttctatctcgcaaaatgattcgctcaggtttcaactgacagaaggggacggctcagaaccccagctgtatctggcggggcatcggccgatttctctagagactgttgattttactcatactgatcaggcagagcgggacgcatggattgacacgcagactcgtgttccgttcaagctgtttcattcacctctgtatcactttactctgcttgtcatgtcagacgaagaagtttggctttattcaaaatttcaccatattatcatggacggcatctcgctcaatctgcttggcaatcagctcattgaaatctaccaaaaaatcatgcgaagcgaggatttggccgaacaccaaagcccttcctatctcagctacatggaaaaagaacagcaatatttgcaatcttcccgttttcaaaaagatcgttcattttggactgaaacgtaccgaactgtgcctgaacacctttcacttgcggaacgaacctctcatcttagacaaagcactgcagcttcaagagatacaatcactctttcccactccttagaacaatcaatccggcgtttttgcaaagatcataatgtcagcatcatctctctgtttatggcttcgttatacatatgcatcagccgtctgacggctaaaaaggatattgccatcggcacttattacggaaaccggggctccaggctcgaaaaggatatgctcggcatgttcgtcagcacactgccgatcagaatgacggcagatcctgatgcggagttcctgtcctttgtccgcagcgtaggaaaagagcagctgtctgttatgcggcaccagaaatatccttacaatctttttgtgaatgaattaaggcagactcatcacgacctgcaaaatatcatcgggatttcgatgcaataccagcctctcgcgtggcgtcaggcagaaggtttcgattatgaaacggcgatgtttttcagcgggcatacggcaaatgagctgtccattttaattaaggagcggacagatacgggattgattgagctgaattttgattatcaatccgctttatttactaaaacatcgattaaacgaattcaaactcatttgctgacgatcgttgaaaatgccgttagaaatccaaaccggctgattcggcatattgatatggcggatgaaaaagaaaagaaacgggtgttaactgcgtttaaccgtacagaaacggctgaaccgccggccccgacgcttcacgggctgtttacccgccgcgccgagctttcgccgcatcgtccggcgctccgttttccgggcggtatgctgacgtacgccgagcttgatcagtacacggacaggctcgccgttcggctccgccaaaaaggcatccgcaaagaaagcatgatcggcgtgctcgctgaacgctcgccggagatggtggtttcagtgcttgccgtgttaaaagcaggcggcgcctatgtgccgcttgaccctgactatcctgaggacaggctgcgctatatgctcgatgactgcggcgcttgtcttctgctcgcgcagccggggttattcgtttccggtttttccggagaaacgctagaagtgtctctttctgctctgacaagtgaggcggagacaggggctgtctctgaagaagcggatgctgattcgctcgcttatatcatttatacgtccggttcgacgggaacaccgaagggagtagctgttgaacaccgtcaggccgccgcctttttatcagggatgcaagggcagtttccgttgacggaagaggatgttatcgtgctgaaatcatccttttcattcgacgcctctatctggcaattgttttggtggacgatgtcaggcgcctccgtgtatctgcttcctgccggatgggagaaagatcctgtgcggatgattgaagctttttcttctgaaaaggtgacgaccgcgcattttattccggcaatggtcaacagctttttagacgcgctggaaacggagcctgaggaaacaagaacacgcctcggcagaacactgacacgcgtgtttgccggaggcgaagctctttccccgcttacggctgcccggtttgcagatctgttgccggagacgatgcttattcacggctatggaccgacagaagcgacggttgatgcggcgttttacgtctgtgaccgaaaacgggacagcggacggacaaggcttccgatcggaaaacccgttccgggtgcccgtctgtatgtattagataatagcggaggaaccatccagcctgcgggcgtggcaggagagctgtacatcgcggggacaggggtggcccggggctatctgaaccggcctgagctgacggaggagcgctttctcaatgatccgttttatccgggagaacgcatgtatcagacgggcgatatcgcacgctggacagaagacggccttgtcgaatggctcggccgttcagacggacaggtgaaagtccgcggctaccggattgaaccgggagaaatcgaagcggcgatccggcacatcgacggcattcgtgaggcggcggtcaccgcccggactgaacacggcgaaaccgcgctttacgcctatattgaaggacgggaaagcgatgacgtgcgggcggagcttgcgacacgccttccggcttacatgatgccggctcagtttatagagatgaccgagtggccggtcacgccgagcggaaagcttgaccgccgcgcgctgccggctcccggcggagcggcagacagggcgtacaccgccccgcggaacgtcacggaaatgaagctttgcgccctttgggaagaggtgctgaaaaacggccctgtcggcatccgggatcacttttttgagcggggcggccattcgttaaaagcgacggctctcgtctcccgcatcgccaaagagttcggtgttcaggtgccgttacaagacatcttcgcccggccgacggtggaagagctcgcttcggttattcaggacttggaagagagcccgtatgaagcgattcagcctgcgcaaaaacaggacacctatccggtgtcttcggcgcagaaacggatgtatgtgctccaacagcttgaagacggcggtgtcggctacaatatgccggctgtgctggaactgacgggcccgcttgaccgcagccggctggaggagacgttccggcagcttgtggagcggcatgagtcgctcagaacgtcctttgaaacggggcctgacggtgaaccggtgcagcgcatccatgacagcgtaccgtttcagctggatgaggccgagtcagctgacgcattcgtccggccgttttgtctggaggaagcgccgctcttccgtgcggctctcgtgaaagaatccgacgaacatcatcttttattaacggatatgcatcatattatttctgacggtgtgtccgtcaacaccttgataaaagaattcggcgagctgtacgcaggccgttcgcttgcgccgatgcgccttcaatataaagactatgccgtctggcagcggtcgtttcaggagaaagaagggtaccagaaacaggaagcgtattggctgaagcggctagaaggagagcttccggtgcttgagcttccggctgacaagccccgtccggctgtcagaagctttgcgggcggcagcgtatcgtgcacgcttgacgctgaaacggcatccggccttcaccgcatcgcccgggatcacggctctactttgtatatggtgcttctcgccgcgtacaatacgttactcgcgcgattgagcgggcaggaagacatcatcgtcggctcgccgattgccgggcgtccgcacaaagaccttgaaccgattctcggcatgtttgtcaacaccctggccatcagaacggagccgaaaggggacaaacggtttaccgattacttggcggaagtccgccaggccgcgcttgaggcatatgagcatcaagactatccgtttgaagagctggtggaacggctcggggtgcagcgggacatgagccgcaatccgctgtttgatgcgatgtttattcttcagaatatggagcgagaagagataaatctggccggtctgaaggcgtcacgatcagagcataccgaacatgatgtatcaagttttgacctgaccttatcagcggctgaatccaatggaaacatccgctttgaaatggaattcagcaccgagctttttaagaaagaaacgattgaacgctggatgggccacttactgaatctcttgcgccatgttgccgccgaaccggaagtcacactatcgaaaactgacattttgaatgaagaagaaaaacaaaagttactgattgagtttaataacacacaaaccgaattcatggaaaaacacaaattgtttcaccagctgtttgaagagaaagcagaagaaacgcctcatcagaccgctgttattgaaggaacacaacagatcagctattcgcagcttaacgagcgggcaaatcggcttgcgcgaacattacacaaaaatggattcggtccgggaaaaagagcagctatattggcaaaccgttcgattgaagcgatcgtcagcgttcttgccgtcatgaaatcgggaggggcgtatataccggttgactcccattatcccgaggaacggattcgctatttattaaaagacagcgcgacatccgtcttgatggtgcagtcagaatacaaagaacttgcttcccagctgacggataacaatttatttctcattcagctcgatcatgaagatcaatacgatatttgtgcaaagaatattcagccggcagcgtctccggatgatactgcatatatcatatatacttcgggaacaacgggaacgccgaagggagtcgaagtcagaaatctcagctttacgcatgcagcacttgcatggcggaaaatttatgagcttgatcgtaaaccagtccgagtgctgcagatggcgagtttctcatttgatgtattttcaggggatcttgcacgcgccctgctaaacgggggaacgcttgtcatttgtccggatgacgtccggcttgagccacaacagctttatcagctcattgatcagcaccgtatcacgttcatggagtcgacacccgcgctgattgttccgtttatggaatatatatatcgccggaagatcgcgctgcgaagcgtaaaaatactggtactgggttcagatatgatcaagtcgcaggatttttatacgcttcatgaacgcttcggaaaagaaatgcggatcattaacagctacggtgtaacagaagcgacaattgattcttcgtattatgaagccgaaatgagcgaaaagccgcgggaagatgatgtgccgatcggtgttccgcttccgaatgtacaaatgtacgtcttaaacaaagacaaacaggtccagccgatcggcgttttcggagagctgtatatcgggggcgccggcgtcgccaaaggatattggggacagcctgagctgacagagggcgcattcagtgacccgttacaaacgggagaaacgctttacagaaccggagatcaggcttgctggcttccggatggaactcttcgttttaaagggcggatcgataagcaggtgaagatcagaggatacagaattgagacgggagaaatagaaagtgtgcttttgaaacacgatcaagtcaaagaagcggctgttaccgtgatgaaagatgccgaaggacaagcccgattagcggcatacatcgttcctaaagaggccgatatctcatcacttcgccagtctcttatgcaggagctcccggcttatatgatgccgtctcatattatcggtttagacagcatgcccctgacactgaacggcaaacttgataaatcggcactgccggcagaagagatacattcatcacaggcatttgtcgcgcccggcgatgaaaaacaggagatgttatgccggatttgggaagatgtgcttcatgttcagaaagcgggaattcatcactctttctttgagcttgggggagattccattaaggcgcttcaagtgtcagcccgactcgccggagaaggctggaacatgtcgatccgcgatttgtttcagttcccgacgattgcagaactcgcgaagcacctcacgccggctgttgcaatggctgatcaggggccgatagaaggaaccgctccgctgacaccgatccagcagagattttttgaggagccgggtgcgtttgagcttcattataaccaagcggtcatgctgtgcagtgaagacagcctcgaaatagatgcgctgtatcaggcggtttgcgcgctgacagaacatcatgatgcgctgcgaatgaccttcactgaaaatgagcatggggaaacggttcaatataatcgcggaatcacaaagcagtatgaagaaatctttacgtttaacgtcatagatatttcagaagaaacgcagcccgaaaaacggatagccgctgaggaaaaagaaatacagcaggctatgcgtcttgatcaggggcctctgcttcatctcggagtgttcaggcagaaggaagccgaccatctgcttataacgattcatcaccttatcgtggacggcgtgtcatggaggatattgcttgaagatctgcagacagcttatcagcaggcattggacggcaaacaaatcgacctgccgccgaaaagcgattcttatataaagtatgccgaagaactttttgacattgccaaaagcaaagcattgctggaggaagccgcatactgggacagcgtgatgtctagtgaaacagcgccgcttccgaaaataactgatgaaaacgccggacgattgcaggaaaacgcgcgcactgcatcgtggatattaagcagcgaagtcacgaaacagctgctgttggaaacacagcaggcatacggaacggatgttcatgaattgcttttaacggcgcttggaatggcgcttcatgagtggacgggttctgaacagatgcttatcagcactgaggggcacggtcgccagggccatatacctgacattgatatgtcaagaacggcaggatggtttacatctgtttacccggtgcttttggatatgagagtgccgggcggctcaggcgaaaaaaccgctcaccgcataaagacggtaaaagacatgatgcgacgggttcctcaccacggaaccggctacgggctgctgagatattcgcgaaacattctttataaagacccagaaataagctttaactatctcggtgcgtttgacggtcttgaaggaacgctgaagatgtcaccgttcaagccgcagcatgatatagcggccgggcgcatccgcgagtttgatctggatattaacgcgatggtggcggccggacaactggaggtaaaagccgtttataccgatgtatttgcaccgggggcaatcgagttcttcatgaatcgtttccatactcacctcgaggacatcatcgcccactgttccggcaagaaagagcgggaaaaaacattaacagattacagccatacagaattgaccgctcaagcactatcaagcattgaagatctcgtaaaaggactttaatttcataaaaaggtgtgtggcattcgtgacacaagcgacagaaattcaagatatttaccctttatcatatatgcaggaaggcatgctgtttcattcgcttctggattccggatcaaacgcatatgtcgagcagatttcgtttacagtcagcggggatttatgcattgatacattccaaaaaagtctggatatgcttgtcagccgctatgatattttcagaacgattttcataaaagaagtgcctgaccttgaaggtccgcagcaggttgtcctttcacgccgtgacacagccgtacagactgagaacatttcagactattcggaagaacggcagcaaagcatcattgaggaattcaaggaaaccgaccggcataaggggtttgatctgcaaaaaggccccttaatgcgcctgactctttttcaaacgggagaaaaccgccatacgtgcgtttggactcaccatcacattatgatggacggctggagcttgggcattgtgctgaaagatttcttcagcatgtattatgcgatccggaacgggcggcctgtaaacctcggcagtccggctccgtacagctcttatatcaaatggctccgaagccggaataaagaagaaacgtcagcgttctggtcgcgctgcttggaagattacggagaagtcgtttccgttccgcaaacgaagaataagccggcgcaaaacggttatgcatctgagcattttcaattttcccttgagtctgaaaccgtacaaaaactgacagacattgcccgaagcaccggggtcacgctgaatactatatttacgggcatttggggcctgcttctccatcgttacaacgggactgaagatgcggtcttcggttcggttgtttccggcaggccgtctgctatcagcggcatcgaatccatggccggactgtttatcaataccgtgccggtaagggtgcgcgcggctggggatatgactttttcttctcttctcaaaaaggtgcaaaaagagtcactcgctgcggaagagcacagctattatccgctgtatgacattcaaaacgagagcggcctgcaaaaagatctcttgaaccatatccttgtctttgaaaattatccggttcagatgcaggctgcggtaaacggctggcagcaaacggaaagcagtgcgctctcacttgaaaacttttcgatggcggaggaaaccaattacgatcttaacgtcgtcatcgttccgggagaagagttttatgtgaaattcagctacaatgcgggcatctacgatcgggaagacatgaaacggatcaaagggcatattctggaggtcatctcctgtgtaacggaagatccggacaggcttttatcaagcatcagtctcgtgcctccggaggaagaagccttgattcattcgtttaacgaaacgaaccgtccgtaccatgagacaaccgttcatgagctgtttgaagaacaggcggcaaaaacgcctgaccaagaggcgttgagatataacggggtaagctggagctacaagaaattaaatcagcgggcgaatcagattgcgcatgcgttaagggaaaaaggcgcacgctccgatcagatcaccgctgttatgctgcgccgatcaatgagtacggttgccgctctgctcggaatttggaagtcgggcagcgcctatatgccgattgatgcggaatttccgcctgaacggatttcatttttactgagagacagtgaagcctcactgctcgtgactgaaaaaggcctgctccccctcattccgccggatttcaagggcagtgtcgtcatcatggaggaaacggtttcccagcagaccgcaccgcttccgccggtatctgacagcggaaattgggcgtatgtcatttacacctccggaacgacaggccggccgaaaggggtgcttgtacaacacaaagcgatcagcaatacattgcaatggcggcgtgaagaatacgggatgacagaaggggacatagcgcttcatcttttttcatacgtatttgacgggtcattaacgagtcttttcactccgcttctgtcgggcgcctgtgtattgttaactgatgaagatgatgcgaaagacgtcctttcaataaaacagaaaatcacccgccacggagtgagccatcttctgatcgttccgtctctgtatcgcgttctgcttgattcgctgacgaaaaaggatgcgcagacgcttcgggcggtgacatttgccggggaagcggccactcctgatatcgtggaagcgagccgcaacatatgcccgaatgccgagctgctgaatgaatacggcccgacggaaaacagtgtggccacgacgattctgcgcaacctgcaaaaaagcagccggattacgatcgggcgcccgattgccaacacttctgtctatatgatgcacggagatcggctgcagccggtcggagccgtcggtgaactgtgtatttccggaaaaggtctggcggacggatattttcagcaaaaagagctgacggacaaagtctttaccgctcatccgttttgtgaaggtgaacggctgtacagaacgggagatgcagcccgatttttaccggacggaacgattgaatatatgggacgctttgacgatcaggtgaagattagaggttacagaattgaattgggagaaatcgaaacggcactcagaagtctgtccggggtaaaagaggcggcagtcaccgtgcgcaaaatggcggacggggaacaggagcttgcagcttatgtcgtactgcaaaacgcgggtgtgacatttgaccctcatgccgaattggccgggagattacctgcttatatgataccgggaagctttacgaaattgacggaaatgccgctgtctgtgagcggaaaacttgatcgggccgcacttcctgagccgaaagaagctgagagaaccggtgattatcaagctccgcgcacaatgcttgagaccgagctgctgtctatttggcaagaagtgctgaaacgggaacatatcagtatgagagatgatttcttccaaatcggcggacagtcgctgaaagccgcgtcgcttgtttcaaacatacataaacggctccaaattgaacttgccgtccgccatgtttttgaacatccgaccatcgagagcatggcccgcttccttgaacagaggaaaagaggagaatatgcagaaatcacgcctgctgtggcaaaggacttgtacccgctatcttttgcgcaaaaaaggctctatgcccttcatcagcttgcagcggacagtactggctatcatatgcccgcttgtctggaactgagcggcagactcaaccgggatcggctgcacgaagccttttcagcgctgttacaaaggcatgaagcgttacgcacttcatttgttttacgaaacggggagccgatgcagcacatacattcatatgtcgatcttgacctcacagagattcacatgccatccgggaaccttcttcaagaggtgatggaaactttcgtcaaaccgtttgacgtggaaaaagcgccgcttttgagagtgactttagccaaagtcactgaagaacgtcattttctgctgcttgatatgcatcatcttatcgcagacggtgtgtcaatgagcgttctgattcaagaattgacggatttatacagaggaaaggagttgcagccgttaaaactccagtacaaagatttttccgtctggcagcatgagcggtttgccgctgaagaattcaaaagacatgagcgttattggctggagacgatcggggaaaacattcccgtacttgatctgccgctcgataaaaagcgcccgcagcttcctgatttcagcgggtccgttgttcgaacgcgccttcaaaaggaatcggcggagaatttgcgccggctcatggatgagacaggttcgacgctgtatatgattcttttggcaagctactccttgttcctttctaaattgagcgggcaggaagacattgtcgtcggttcacctgcggccggcagaagccgcgctgagcttgacggggtcatcggcatgtttgtaaataccgtggcaatgagaagcaggccgaaaggggataagacattccgcgcttatttagaagaggtgaaaatgctcgccctcggcgcggccgaacatcaggacttcccgtttgaagaacttgcccaaaagcttgatacacaccgggaagtcaatcgcaatccgctgtttgatgccatgctcgttttgcaaaacagtgatgatttcgaagtgaaccttccgggcttatccgtttcttcacatgcagtgaagcatgacatttcaaaattcgacttgacgcttcatgccgaggaacggccggatggctcactggattttcattttgaatacagtaccgccttgtttgaaaaggatacgatcgaacggtgggccggtcattttaaagagcttttaggacaaatcgcatcggatgatgagcggaagctgtctgacattcatttgctggacacaaacgagcggcagatgcttcttcaagcgggaaatcaaacggcggagtatccgaggcatgaaacgatcgtcagtttatttgaagcacaggcggaaaaaatgccggatcaaattgcagccgtcatgtctgatgagcgtctcacctaccgcgagctcaatgaaaaggcggatcgaatcgccgatatgctgtcggaaaacggcatccgctccggacagattgtcggaattatgaccgaacgatctccggatatgctgattgggattctcggtattttaaaagcgggaggagcttatctgccgatcgatcctgactatcctgacgagcgaatttcatttatgctgactgacagcggcgcgcgtgttctgttgacgcaatcgggtcttgggatatccggaatggacgggctgccggttttatacatcgataagcctgaatccgtttcagcagacagaacgaaaggaatgataacgcctgaacagccggcttacgtgatttacacatcgggcacaacaggaaaaccgaaaggcgttatgacggaacaccgcaatgtcatcagccttatcaaacataaaggactgccgtttgatttcggctctggagacgtctggacgctgttccactcctattgctttgatttttctgtatgggaaatattcggcgcgctcttatacggcggaaaggtggttatcgtgccgaaagaaactgcccgtgatccgcatttgtaccggcagctgctgcaaagtgaaggtgtaacggtgctgaaccaaacgccgacggctttttccggactcattcatgaagaggccgggcatacggatagactaaagcttcgatatgtcattttcggcggagaggcgcttcagcccggcatgctgaaaagctggaaagagaagtacccggagacggagcttgttaatatgtacggtattacggaaaccacggttcacgtcacatgcaaaaaactgaatatggatgatattgagagaaacaaaagcaatatcggcagaccgctggaaaccctccatgcttttgtcatggatatctatatgaatccgcagccgatcggaattcccggtgagctttatatcggcggggaaggtgtcgcgaggggatatgtaaacagggatgatttaaccgcctcccgtttcatcacgaatccgcatgtttccggcatgcggctctaccggacgggcgatatcgccaaaaggctctcaaatggcgagctggaatatgtcgggcgtaaagatgcgcaagtaaaagtcagaggccacagaattgagctgggagaaattaaatcagcgctgcaagagctttcctctgtgaaagaggccgccgtgatcacacgtgctgatcagcatggtcagcactccatttacgcatacgcggtcttacacggaaacgaaaagataaaagaagcagagattcaggcctctctcagagcttttctgccggaatatatgattcccgcccgcttgatagagcttgatgaactgcctttgacggcgaatgggaagctggacgagaaggcgctcccgcagcctgaattaaatgatagccttggagatgatatcagcctgagaaatgaaactgaagaaatgatggctgacatctgggaagaactcttaggtgttgaaggactcggccccaatgctcatttcttccatctcggcggggattcgattaaagcgctgcaagtatgtgcgaggctgaaacagcagggctatgaaacgaccgttcgcgagctgttcgagcatcagacactgggagaaatatcgatgcggctccggaaagtccgccgcgtgattgatcaggctcccgtcacgggagacgtgccgctgacgccgatccagcattggttcttgtcgcaatcattgccgcatgatcattttaatcagtccgtaatgctccgcagtgctgacagaatcaatgaatctgctatgagaaaagcgctggcacagctcgcggttcatcatgacgcattacggatcgtatgcggcacgcaaaacggatcggtgactcaatacaacagagcggaaaacctttctgaagaagaactctttacgtttgaaacgcatgacgtgagagggaaagggtcattacaagaggagcacgccgcaattgaacaggcggccgcccttattcaaacttccattcggctggagacgggtccgctcgtagctgtcggattatttcacgctaatgatggcgatcatctgctgctttccattcatcaccttgtcattgacggggtgtcatggcggattttatttgaagatctcaccgcatgctacaggcaggcgctcgaaggaaaagaaaccgcgcttccggcaaaaactgattcctatcagacttacgcgaagcaaatctctgattatgcaaaaagccgccggctgttacaggaagcagactactggtccgaaagagaaaaagcggcggtcaaaccgcttccgaaagatgcccgcatctcttccaatcttctgaaagatacagatgtgatgaccgttacattgacaaaacaggagactgagcagctgttaacggaagcgaacagagcatacacaacagagacgggtgaattattgcttgccgcgttaagccttgcgctgaacagatggaccggaaacgagacattcaaaatcagcatggaaggccacgggagggaagagcacctggagcatcttgatatcagcagaaccatcggctggtttacgtcaatttatccggtattggttgacgcaagttttcaagatcaggctgatgacggcgagcggctcggctatcacattaagcggacaaaagacatgatgcgccgcattccgcataaaggagcgggatacggggtgctgaaatatataagcaaactctgggaagagactgaatctgattctcctgaaatcagttttaactatctggggcagtttgacagggagatccgttccagcggctttggtgtttctcccgtaaaagctggaaatgaagtcagcccggactgggaacgtccgtacacacttgatatcagcggatccgtatcgtcggaatgtctcagcatgcatgtcgtgtacaaccgttttcagtatcaaaaagaaacgattgaagttttgacgggacattttcatgcctttctcaagcagatcatcacgcattgcacaggcaaagaggagcgtgaatggagcgccgctgatttcagtgacgaggagttaacgctggaagatctgagtgacattatgggagccgtcaacaaactatagaaaaggagtggcgcaatggggcagcaaccggaaatacaagatatatatcctttatcttttatgcaggagggcatgctttttcattctctgttggatcatgactcaagagcctacttcgaacaagcggtgtttacgatcaacggacagcttgaccgggaacgattccaaaaaagtatagatgctgtttttgaacgatacgatattttccgtacgacatttattcataagaatgtggcgaagccccgccaagtcgtgttgaaaaacagaccgagccgcgttcagtttcatgatatttctcatttggacgagaaggcacaagacaaatatgccgaccggttcagaaaagaagataaagataaaggctttgatttgcaatcagaccctctcatgagagtctccattttgaaaaaagcgcctgaacgctatgtttgtatatggagccatcatcatatcgtcatggacggctggtgcttcggaattgtcatgaaggaatttctgatgatctatcaatctctcggagacggacggctcccgtctctcgagcctgttcagccatatggaaagtatattaaatggctcatgaagcaggatcgtaaagaagccgagattttttggaaaacgagacttgccgatcttgagcaatcggcgtctcttccgaaaaaatccgcggaaccaaatggcgaacttgagcaggcggttttcaccatttctgaagagcagacaaatgagctgaagaacattgcggcaagggcgggagcaacgctgaatacagtgttccaggcactgtggggcatgttgctgcagcgtgtcagccgctgtgatgacgccgttttcggttctgtcgtttccggccggccgtcggatctcgcaggcgtggaaaaaatggtaggactgtttatcaatacgattcccgtgcgggtgaaaagcggttcattttcttttctggagctcgtcaggcatttgcagcaggagacgctgcaagcagaagcgtacagctattatccgctgtatgacattcaggcgcaaagccctctgaagcaagcgctgtttgaccacattatcgtgtttgaaaatgtgccggcccagcgtgaaattgaaaatgtgagtcaggccggttcatttgattttgcggtagaggatttcacgatggaggaagttacaaactacggatgcagcataaaggtgattccgggaaattctctttatatacgcttaaactttgataccggtatatacgacagcgtttttatgaagaatatcgaaacatttttacggcatatgatggagtcagtcatttccgaccctgaaatgagcgcctccgagatcgcattgcttgatgcgtgtgaagccagaaatatgctggatgcgtttaaccgtacagaaacagttgaaccgccggctccgacgcttcacggactgtttgcccgccgtgccgcgctttcgccccatcgtccggcgctccgttttccgggcggtatgctgacgtacgccgagcttgaccagtacacagacagactcgctgttcggctccgccaaaaaggcgtccgcaaagaaagcatggtcggcgtgctcgccgaacgctcgccggagatggtggtttcagtgcttgccgtgttaaaagcgggcggcgcctacgtgccgcttgaccctgactatcctgaggacaggctgcgctatatgctcgatgactgcggcgcttgtctcctgcttgcacagccgggattatccgtttccggtttttccggcgagacgctagaagtgtctctttcttctctgacaggcgagacggagacaggggctgtctctgaagaagcggatagcgattcgctcgcttatatcatttatacgtccggttcgacgggaacaccgaagggagtggctgttgaacaccgtcaggccgccgcctttttatcagggatgcaagggcagtttccgttaacggaagaggatgttatcgtgctgaaatcatccttttcattcgacgcctctatctggcaattgttttggtggacaatgtcaggcgcctccgtgtatctgcttcctgccggctgggagaaagatcctgtccggatgattgaagcgtttgcctcagaaaaggtgacgaccgcgcattttattccggcaatggtcaacagctttttagacgcgctggaaacggagcctgaggaaacaagaacacgcctcggcagaacactgacacgcgtgtttgccggaggggaagctctttccccgcttacggctgcccggtttgccgatcttctgccggagaccgtgctcattcacggctacgggccgacagaagcgacggttgatgcggcgttttacgtctgtgaccgaaaacgggacagcggacggacgcggcttccgatcggaaaacccgttccgggtgcccgtctgtatgtattagatagcggaggaaccatccagcctgcgggcgtggcaggagagctgtacatcgcggggaccggcgtggcccgcggctatctgaaccggcctgagctgacggaggagcgttttctcaatgatccgttttatccgggagagcgcatgtatcagacgggcgatatcgcacgctggacagaagacggccttgtcgaatggctcggccgttcagacggacaggtgaaagtccgcggctaccggattgaaccgggagaaatcgaagcggcgatccggcgcatcgacggcattcgtgaggcggcggtcaccgcccggaacgaatacggcgaaaccgcgctttacgcctatatcgaaggacgggaaagcgatgacgtgcgggcggagcttgcgacacgccttccggcttacatgatgccggctcagttcataaagatgaccgaatggccggtcacgccgagcggaaagcttgaccgccgcgcgctgccggctcccggcggagcggcagacagacaggcgtacaccgccccgcggaacgtcacggaaatgaagctttgcgccctttgggaagaggtgctgaaaaacggccccgtcggcatccgggatcacttttttgagcggggcggccattcgttaaaagcgacggctctcgtctcccgcattgccaaagagttcggtgttcaggtgccgttacaagacatcttcgcccggccgacggtggaagaactcgcttcggttattcaggacttggaagagagcccgtatgaagcaattcagcctgcgcaaaaacaggacacctacccggtgtcttcggcgcagaaacggatgtatgtgctccaacagcttgaagacggcggtgtcggctacaatatgccggc

SEQ ID NO: 40 - DNA, 16782 bp, Bacillus velezensis
  source 1..16782: mol_type = genomic DNA
gcgccgatggtagtcgggggtttccccctgtgagagtaggacgccgccaagctatcattacggtaaaggcagctcatcatgagctgccttttttgtttataagtattgcttcaggaaattagaaacgtaatacggaaatttgcgttccgtgacatctaagaaccggcggatcatcacataatcatcactgacatgctgtgtcagcagttcataccaccactccgtttcatatctcgcaatcatcccgatattgtagagaaccaaataatgagtaatcatttccggaagatgcaggaagtgatcacgctgagagggaatgtaatattgatttttctccaagtgaaacaataaatttggcgaagaccaaggttctctgtctatcgggtcagcctcaaaaaccaagtggttatggtctttcctcagaaaagaccactttaaatgatggctgatatattcagcaaagcgggaatcagacatattgtaatgaatcaccgcatgctcaggcactgaaataaggtcatctttcagctctactcgggtcagccaatgctttttctcttggaagtaaaagacagtatgcaattcaggtatggctgtcagcaatttcttcattgtgtaccgttcttcctcaagaccagctatcccgaataagtgcttcattacatgaatacataagccattgcgctgcaccttcacttcatcatccctaaaggagtaattttgctttttgcgtttccgggcagtcacgccatgcgcgagtactgaggcatggcttggatagcttggatctgtggtcagaaggcaggctttcagcaattgtgacatcccgtaaaacaacagaataggcttaatttctaaaggggaaagagatgcctgcttatagaaggactcggcgtgtttgataaagaatatgaagcgctcactgttcttaaacgcatatcgttttgattcttccatgccgctttctgtatagattttatttagaaatttctgggaagattctacggaataaaataatgataactctttccactcatgatctctcatatgtatttttaaaccctttcctttatctaaatatttcaactctttttcgcttccttgacatgctgttttctagttgataatctacatataatattttgccgaaaagagggggatttactaatgtgggaaagtaaattttcaaaagaaggcttaacgttcgatgatgtactgctcgtaccggctcaatcagacgtacttccgcgtgatgtggatttatctgttgaactgacaaagacgttaaagcttaacattcctgtcatcagtgcgggaatggatacagtaacagaatcagctatggcgattgcgatggccagacagggcggcttgggcattatccataaaaacatgtccatcgaacagcaggctgaacatgttgacaaagtcaaacgttctgaacggggcgttattacaaatcccttctttttaacacctgatcatcaagtattcgatgcggagcatttgatggggaaatacagaatttccggtgttccgatcgtagataataaagacgatcaaaagcttgtcggtatcattacaaaccgtgatcttcgctttatctctgattattcaatgaaaatcagtgatgtcatgacaaaagaagagctggttacggcttctgtgggaaccacattagacgaagcagaaaaaatcttacagaaacataaaattgaaaaacttccgttagtggatgaccaaaacaaattaaaaggtcttatcacgatcaaagatattgaaaaggttatcgaattcccgaattcatctaaagatgaacatggacgccttattgtcggcgctgcggtaggcgtgacaggcgatacaatgacacgcgtcagcaagcttgttgaagcgaatgtcgacgttatcgtggttgatacggctcacggacattccagaggcgtactgaacacagttgcgaaaatccgtgaaacatatcctgaactgaacattatcgcaggaaatgttgcaacggctgaagcgacaaaagctctgattgaagccggagcaaatattgtcaaagtgggaatcggacctggttctatctgtacgacacgcgtcgttgcaggtgtaggcgtaccgcagatcactgccatttatgattgtgccactgaagcgagaaaacacggcgcgacaattatcgcagacggcggtattaaattctccggagatattacgaaagcgttggcttcaggcggacatgccgtaatgctcggaagcctgcttgccggcacttcagaaagcccgggagagactgaaatctatcaaggcagaagatttaaagtgtatcgcggtatgggttctgtcgctgccatggaaaaaggcagtaaagaccgatatttccaagaagaaaataagaaattcgtccctgaaggtatcgaaggacggactccgtacaaaggtcctgtagaagaaacagtgtatcagcttgtcggcggtcttcgttcaggtatgggatattgcggttcaaaagacttgcgcgctttaagagaagaggctcaattcatccgtatgacaggtgccggtcttcgcgaaagtcatccgcatgatgtccaaattacgaaagaatcaccaaactacacaatctcataattgttacaaataaaaaacatttgacagggtcgctgactctgtctattttttttatatcgagtgtgataaaatttatactgttgtgttttgaatttgaatatgtccttaacggcttaattatagatttaaaatgaatgacggaggtcgtaagattgaacatcacgaaatggaaacagctgttggtgtcattagtggtactggcactggccgcaacttgctttgttccaatgtctaaagcggaggcagccggcaatgacccgattgatgtcaacgcatcagctgcgataatgattgaggcttcatcgggaaaaattttatacagtaaaaatgcagacaaaagactgccgattgccagtatgacaaaaatgatgactgaatatctgcttctggaagccattaaagaaggaaaagtgaaatgggatcaaacgtatactcctgatgattatgtctatgaaatttctcaagacaacagtttatcaaacgtcccccttcgaaaagacggcaaatacacggttaaagaactgtatcaggctatggcgatttactctgccaacggagccgcgattgcagttgccgaaattcttgccggaactgaaacgaaatttgtcgctgaaatgaatgcgaaagccaaagaattaggcatgacaaactatgattttaaaaatgccacagggcttgtgaatgaagaccttcacggcaagcagccgcaaggagaaggcgttaaagaagagagtgaagtttctgctaaagacatggcgcttcttgcagaccgcctgatcactgattatccggaagttctcaaaacaacaagcattgctaaaacgaaattcagagccggcactgatgatgaaatggacatgccgaactggaacttcatgttaaaaggtcttgtttctgaataccctggcgttgacggcttaaaaacgggttctactgattctgcgggatcttgttttacaagcacagcacagcggaacggaatgcgggtcatcaccgttgtattaaacgcaaaaggcaacctgcataccggacgttttgatgaaacaaaaaaaatgctcgattacgcatttaaaagcaatttctcaatgaaagatctttaccctgaaggctctcaagtaaaagggcacgaaacgattgacgttgaaaaagggaaagacaagcaagtcgatattgttactgacaaggcgctttctattcctgtgaaaagcggggatgaaaagaattataaagccgaagtgactttagataaaaaagaaatcacggctcctgtgaaaaagggaacgaaagtcggaacgctgacagttacatacaaaggcagtgacaaagactatggcttcctcaaatccaaagagttcagcgtgaatcttgtaacgaaaaatgatgttgataaagcaaactggtttgttcagatgatgcgcggcatcggcggattcttctccggaatctggaacagcgccgttgacacggtaacaggctggttttaagaaataagaaagagctctgatgaaagttagggctcttttgcttaatatactgaaaaaaccaaattattagtaaaaaatgatatctatcttattcatctcgctgtaaaataagaatacccatatgaaatattgtatttctgggatacaataagagatagaaattatctaactatacattgactagggggaccaaataatggctcaaacaggtactgatcgtgtaaaacgcggcatggcggaaatgcaaaaaggcggcgtcatcatggacgttgtaaatgctgaacaagcgaagattgcggaagaggcgggagctgttgccgtaatggcgttagaacgcgttccggctgatattcgcgctgccggcggtgttgcccgcatggctgatccgacaatcgttgaagaagtaatgaatgctgtatccattcccgtaatggcaaaagcgcgtatcggacatatcgttgaagcgcgtgtccttgaagcaatgggagtagattacatcgatgaaagtgaagttctgactccggctgacgaagaatttcatttaaataaaaatgaatatacagtcccgttcgtatgcggctgccgtgatctcggcgaagcaacgcgccgtatcgccgaaggagcttccatgcttcgtacaaaaggcgaaccgggaacaggaaacattgtggaagctgtccgccatatgagaaaagtaaacgcgcaagtgcgcaaagttgttgcgatgagcaatgatgagctgatgactgaagctaaaaacctcggcgctccttatgaactgcttcttcaaatcaagcgtgacggcaaactgcctgtagtgaactttgctgccggcggagtagcgacgcctgctgacgcggcattgatgatgcagcttggcgctgacggcgtatttgtcggttcaggtattttcaaatcagacaaccctgctaaattcgccaaagcaattgttgaagcaacgactcattacacagactacaaactgatcgctgagctttctaaagaattaggcacagcaatgaaaggcatcgaaatctcaaatctattgccggaacagcgtatgcaagaacgcggctggtaaaaccataggagagctggaagcatgttaacaattggtgtacttggacttcaaggagcagtaagagaacatattcgttcaattgaagcatgtggttcaaaaggtgtcgtcattaagcgtcctgaacagctgaatgatatcgacggcttaatcctgccgggcggggaaagcacgacgatgcggcgtttaatggatacgtatcattttatggagccgcttcgcgagtttgccgcccaaggcaagccgatgttcggcacatgcgccggtctgattattttagccaaagagatagcgggaacggataacgctcatttagggctgttgaacgttgttgtcgagcgtaattcctttggccgtcaggtcgacagctttgaagctgatctgacgattaaaggccttgatgagccgtttacgggtgtatttattcgcgcgccgcatattttagaagccggagaagatgttgaagtgctttgtgagcataacggacgcatcgtggctgcaaagcaggggaatttcctcggttgctcgttccatcctgaactgacggatgatcaccgggtgacagagctgtttgtgaagatggcggaaaagcataagcaggaaacagctgtataaaacagttgaaaaccgctgatacttatagtacattataaacacaaataaagatcgaaaagcgttgacaggaagcagtagggagcccctctttcaaagagagccgatgggtggtgcgaatcggtgaaagatgctgtccgaatccgtccttgagcgaaatgctgaaaacaagtaggcatttacgggaaaaccgttatgtgttaaagcgggaagcaagtgtgagcttgttttcaatcagggtggcaacgcgagagctctcgtcccttttaggggatgagggctcttttttattttcgataaaaacagataggagttgttaggcatgattgatacgaaggtgctgagagccaattttcaagaggtaaaagcgaagctcattccaaaaggcgaagacttatctgactttgacaagtttgaagagctggacgaaaagagaagagagcttatcggtaaagtagaagaactgaagggaaaacgcaatgaagtgtctcagcaggtcgccgttttgaaacgggagaaaaaagacgctgatcatattattaaagagatgcgtgaagtgggcgaagaaattaagaagcttgatgaagagcttcgtactgtcgaaaagacgctcgaaaccatccttctgtctattccgaacatcccgcacgattcagtgcccgtcggggaaacggaagatgataacattgaaattcgcaagtggggagaggcgccggcattttcatatgagccgaaaccgcattgggatatcgcagaccatttaaacattcttgatttcgaacgcgcttcaaaagtaacaggcagccggtttgtgttttataaaggattaggcgcccgcctcgaacgcgcgctctacaactttatgctggatcttcacgttgatgaatatgattacacagaagtcatccctccttatatggtaaaccgtacgagcatgacaggtacgggacagcttcctaaatttgaagaggatgcttttaaaatcagagaagaggattatttcttaattccgacggcggaagtgccgattacaaatatgcaccgcgatgaaatcttatccggtgagaacctgccgatcaattatgccgcattcagcgcctgcttccgttcagaagcgggatctgccggccgtgatacacgcggtttgatccgccagcatcagttcaacaaggttgagcttgtgaaattcgtgaagccggaagattcttatgaggagcttgaaaaactgacaaatcaagccgagcgggtgcttcagctgctcgaactgccgtatcgtgtcatgagcatgtgtaccggtgatctcggctttacagccgcgaaaaagtacgatattgaggtatggattccaagccaagacacataccgtgaaatttcttcttgcagtaacttcgaggccttccaggcgagacgcgcaaacattcgattcagacgcgaagcgaaaggcaagccggagcatgtgcatacattaaacggttcaggtcttgcagtcggcagaacagtagctgccatcttagaaaactaccagcaggaagacggaagtgtcatcattccgaaagtgcttcgtccttatatgggaaataaagaagtcatcaaaccgtaaaaggtgcgccctagaggcgcgccttttttgctgcccggtatagagcggcggcattccgggctgtgctttcaaggttaaaacggccggatgctaaggcgtcttcaagacttacagcgccgggcacgatagaaaatacagctgttattcctgcgctgtaaacatgctcgaaatttttgcctaaggagcccgccaatgcgataacgggaatttcttgagcagatgcgcgtgcggcgatcccggcgggggttttgccgaatatcgtttgtccgtctatctgcccctctccggtaatgacaaggtcagcgcctcttatctgatctgagaaggacagtgtatctaatacaacatcaatcccgctttgaagttctgcctgtaagaaagcgatcagtccggcgcccagtccccctgcggcacccgcgccttttacggtatccgcttcgatatcgtgctgacgtctcaatatgtcagcgaaatggcgtaagttgcgatccaatacaactttagtcttctcggacgcccctttttgcgggccgaagacatatgacgcgccgttttcaccggtcaggggattttcgacatcacatgcggcacggatacggatatgtttcaggtcaggagagagaccgcttatatcaatagaagctagggtgtgcaaagcgcctccgccgtcaggtatctcctgaccttcctcatttaagaaacgcacaccgagcgcgctcgccattcctgctccgccgtcattggttgcgctcccgccaagcccgatgatgatctcacccgccccgcgggaagctgcatctgctatcagttcacccgttcctcttgtcgttgtgttcaacggatctctgagatggcggggaacgagatgaagccctgatgattccgccatttcaatgactgccgtgcgtccgtctcccagaagtccatatgcggcatttaccggcgttcccaacggaccggtcacagtttttttgataatgcttccgccagtggcatccgtcaaagcctgaacggttccttctccgccgtcggccgcaggtatcttgatatattccgcgtcagggaagaccgctttgaatcctttttctatgctgtcagcggcttcttttgatgtcatgctttctttgaaagaatcgggtgcaatgatgattttcattatgttctccacctttatgagcaggttatctgtttgaatctattcttggtttttactgtgattccctgcccgtatggcatactgaggttgaattggacgcaagacttttgtatgatagtaaagctgacggacaagccgtttaagaaaagaaataaaaaatatgaaaaagcgcttgactgaaatttaggtcatgtggtatattattaaatgtcgatacggaggaatacccaagtctggctgaagggatcggtcttgaaaaccgacaggggtgtcaaagcccgcgggggttcgaatccctcttcctccgccatattgattttaaacctaatgaaactcgagcatatattggagattgttttgtccgctgcatgtgatgcagcggattttttatatgcaaaaaaagcgattttctctgttcggggaaaatcgctttgctatttttatttatttctgttttcgttgatcacgtgactgattttttcgatcaaaggttccagtgactgttcatcagcttcaaggtcataatcttcaatgcgtactttcagcacagggcaggcgttaaaaccgctgatccagtcttcgtaccgtgtatacatctcttcccaataggagcggtttgtctgcagctccatctcgcggccccgcttttcaatccggtttataatgttttcaaggtcgccttctaaatagatcaaaacatcaggatgcgggaagtacggcgtcatgaccatcgcctcaaacaggcttgtgtatgttgtgtaatctgtcagcgacatggttcctttatcggcgtgcatttttgcgaatatgcctgtatcttcataaatcgaacggtcctgcacgaatccgccgcctgattcaaacatgtttttctgctctttgaaccgctcagccagaaaataaatttgcaaatggaagctccagcgttcaaaatcgtgataaaacttctctaaataagggttttcatccacttcctcaagtgaggtatgaaacccgagccgttttgctaaagctttggtcaaagtcgattttccgactcctaccgttcccgctactgttataatggcgttgtttggaatatgaatgtctttcatttaataagctcctttacctgacgggcaattctttcatagtctgtcttattcaaaacaaagtcttcagtatcaccgtcaatggtcagtacagatatatccgggtcttcttcctgaagctgtctgatggctgtgtcgtaatctgtaatgagacgttccaaatattgatgttcgatatttttctcaaacgggcgcccgcgtttttcaatgcgttgaagcaatgtcggcaggcttgcctttatgtatacaataatattcggtttcggcaggtcgtgagtgagcagatgataaatctgcttatatttctcaagcttttggccgtgcaatgtacgctctgcgaaaataacatttttataaatatgataatcggacaaaacgggctgtccttgttttaaataatctcggtcggtgtcttcaagctgtttatacctgtgacaaagaaaaaacatttcaagctggaaactccactcctcgatattgtcataaaacttatcgagataagggttgtcttccacaatctcattaatcataggaaaaccgagctcttcagaaagcatcgtagcgagtgtcgtttttcctgccccgataggaccttctaccgcgataaaaggggctctgttcattgaaaatcctccttaattctgcaaacatccgtcagctgccggcctttatattgtatcacaatctcagaaaagcccatgaaaaaagacgcttccaattaacgaaacgtctctttcacaatatgaaattgatcgccgagcaaaagccagttttgcgggaaggagaggccgagtttccaatagctgattcctcttaaatgaagttctttaattaaattgaatttcgcttgaatggatcgtgcgtcttcaaaccatacttcatgccgtctctgattttcatccgtgtaacgaaagaatggagcctgagcggtttcgtcatattgaatgtcgactttatggcgtgctgccagagcgattgcctgctgaggactgacggctttcgctgtcgttccctgtttgaaaggcagtgtccaatcatagccgtacatattctggcccatgacgatttttgaagagggcatttccgtcagcgcgtactcaatgacatttcttacagggccgataggtgatacggcctgagccgggcctccgctgtacccccactcatatgtcatgattacgacaaaatcgacgatttctccatgtgccctatagtcatgtgcttcgtaccatttgccggcctgagtcgcgctcgttttcggagcaagcgccgttgaaatcttccagccttcccgatgaaaaatcgttctcgcttcacgtaaaaaacgattgtaggcttctctgtcctgtggacgtaaatattcgaaatcaaagtgaatatcgcgaaagccgtgctttttagccgtggcgacgatttcctgaaagagttttgttttcactgtattgtcattcaagatgagccgcccgagttcatcgctgaatgcgtcattttcaaggttggtgatgatcatcatcagtgtggtgttgtgcctgtcactgatgctttttaaattggtcagaggcggttcctttaaagtcccgttccgctgcacttgaaaactgaatgcgccgaggtatgttaaataaggagaggcctcccttgccgcctgctgcagattagcgcttacgctcgttccccgcggttctatatatgcatttgattcgatatcgggcttattcgcctgctgcggaatgtaaaggcgggttccgactctcaatgtggtgccgggctgaattccgttcaccctcgcaagctccgcggccgatatatgaaaacggccggcgattgccgcaagagtatcaccttgtttcacttcgtaatattgaccctcaatcgggatgacaagggtttgtccgacaaccaatgtatttggattaggcagtttatttgcttccgcaatgacatttgcggctgtccggtagcgcgccgcaatagcggaaagtgtgtcgccccgtttcactatatagatctgaatgaaaaacgcctcctttcatatccgctatcaaatatatgaaaaaaggaggctgatcatgtttatttttcggcggtaatttgtttttccgtggttatttctgcgaagagaacattctccatcatggtcaaagcgaaatcattgtcttcgtcgttattggaagcggtgcagtctttcggaatggtaatgctgtattctctcatataggcgtcgttggccgtgaacagcacacaaatgttcccggcaatccccgtgatgattaatcggttcacttgtaattcggtcagaagggtgtgaagcgccgtttcgtaaaaagcggaatgcttcggtttaatgagaaaataatcatcaggctgaggcgaaatatcttttataatgggggcgcttctgtcgttgctgcattcctccctgatggcatcaatatcagccttccagagcccgtaatgatcattaatataaataatcggccagttgctttgttttgcatgcttctttaatgataaaatacgggggacaatttgtttggttttttcagcaagacgttcgcccatatcaaattgaaaattgttgatcatatcgacaatcagaagggctgtgttgttaggttcagacaataccggcaactcctttctgctggggtattcctattttaacctttatgagacatgaaaaaacttaagaagagagcttgaaccgatgaatgatgaatattatatgagagaagccataaaagaagcgaagaaagccgaagcgaaaggtgaagtgccgatcggagcagttcttgttctgcatgatgagatcgtggcgcgggcgcataatctgcgggagactgaacagaggtcgcttgcccatgccgaaatgctggcgatagacgaagcgtgccgtaagctggggacatggagacttgaggatgccgttctttatgtcactttggagccgtgcccgatgtgcgcgggagccgtcgtgctttcgagagtcgataaggtcgtattcggcgcatttgatcccaaggggggctgtacaggaacgctgatgaatctcttgcaggaagagcggttcaaccaccaagcggaagtggtgagcggcgtgctcggagaagagtgcggagaaatgctcagcgcttttttcagaaagctgcgccggcaaaagaaagacatgaggaaaaagttgtctgagtagtacggttgcattttctgcctgaagcagatatacttatgtgtgcatcatgaatggtgcgcatataaaaatttgatatttattttgccgtgctaagcggggaggtagcggtgccctgtacccgcaatccgctctagcggggccgaatcccttctcgaggttcgtttactgtaaggtctgccttaagtaagtggcgttgacgtctgggtcctgcgcaatgggaattcatgaaccatgtcaggtccggaaggaagcagcattaagtgaaacctctcatgtgccgcagggttgcctgggccgagctaactgcttaagtaacgcttagggtagcgaatcgacagaaggtgcacggtaaatcaatcatcaaatttcagactcacctgtttatggcaggtgagttttttcgtatatgaaaaacgggttttggcgttaaaagcacgttcatgtataataaacatgatgaataacagaggagggcgcatcctgtgggttaccaagctttatatcgagtatttaggcctcagcagtttgaagatgtggtcggacaggaacacattacgaaaacgctgcaaaatgcccttttgcaaaagaaattttctcatgcatatctgttttctggaccgcggggaacgggaaaaaccagtgcagctaaaatatttgcgaaagcagtcaactgtgagcacgcccccgtagaagaaccgtgcaatgaatgtgcggcgtgcaaggggatcacaaacggctctatatcagatgtgattgaaatagatgcggcgtcgaataacggcgtagacgaaatccgcgacatccgtgacaaagtaaaattcgccccgtcggccgtcacctacaaagtatatattatagatgaggtgcatatgctctctatcggcgcattcaatgcgcttctgaaaacgctggaagaaccgccggcacattgcattttcatattagctacgactgagcctcataagattcctttaaccattatctccagatgtcagcgttttgacttcaaacggattacatccaaagcaattgtcggacgaatgaagacaatcgtcgatgcagagcagctgaaggtggaagaaggagcccttgatatcatagcgagtgctgcggacggaggtatgagggacgcgctgagcctgctcgatcaagccgtatcattcagcggcgaggagctgtcggtggatgacgcactgctcattaccggagccgtttctcagcactatattgggaaactggcatctgctcttcaccgcaaacaggtttccgaggcattggaaacactgaatgaattgctccagcaggggaaagatgcggccaaactgattgaagatatgattttctatttcagggatatgctcttgtaccaggccgctcccggtttagaaggagtcctggagaaggtgaaggtcgatgaaacgttccggaatctgagcggtgatataccggcccccgctttatatgagatgattgatatcctgaataaaagccatcaggaaatgaagtggacgaaccacccaagaatcttttttgaagtggctgtcgtgaaaatatgccagacggcacagcaatccgccggagacatccctgaggtcggcatgctgatgaataagattcagcagcttgagcaggaagtggaaaggctgaaaacctccggtgtgaaggttcagatggaaagcgctccgaaagaagctccgcgtcctcaaaaaggcggaaaaagccattataaagctccagtcggaagaattcatgagatattgaaggaagccacaagacctgatcttgaacagcttaaaagcagctggggcaagctgctggcacacctgaaacagcagaataaggtgtctcatgcggctcttttgaatgacagtgaaccggtggctgctgctcaaaaggcatttgtgcttaaatttaaatacgaaatccattgtaaaatggttgcagaagacaataacggagtccgtacgaatcttgaacagattctcgaatcaatgctcgggaaaagaatggatttgattggcgttccggaagcacaatggggtaaaataagagaagaatttttaaatgatcaccagcaggaaagtgaaggatcaaacgaaccggctgaagaagatccgctgattgcagaggcgaaaaaacttgtcggagcggatttaatcgaaataaaagactaataagatgaaagagagtgattgaatatgcgtggcggaatgggaaacatgcaaaaaatgatgaaacaaatgcaaaaaatgcaaaaggatatggcgaaggctcaggaggagcttgctgaaaaagtgcttgaaggcacagcgggcggcggaatggtgactgtaaaagtcaacggccaaaaagaagttgtagacgttgccattaaagaagaagtcgttgatccggaagatatcgaaatgcttcaggacctgattcttgccgcaacaaacgacgccctcaaaaaagtggatgacatgacgaatgagacaatgggacaatttacaaaaggaatgaacataccgggtttattctagggggataaataaacatgcagtatcctgaaccaatatcaaagctgattgacagctttatgaaattgccagggatcggaccgaaaacagcggttcgtctggctttttttgttctaggtatgaaagaagacgtggtattagatttcgcgaaagcattagtaaatgcgaagcgcaacctgacatattgttcgatttgcggacatattacagatcaggacccttgttatatatgtgaggacacaagaagggataagtctgttatttgtgtcgtgcaggaccctaaggatgttatcgcaatggagaaaatgaaggaatataacggccagtatcatgttcttcacggcgcgatttcaccaatggacggcatcggcccggaggatattaagattccggagctgctgaaacgtcttcaggatgatcaagtgacagaagtcattctcgcaaccaaccctaatattgaaggggaagcaacagcgatgtatatatcaaggctgttaaagccctcaggcatcaagctctcccgtattgcccacggtctgcccgtcggcggtgatttggaatatgctgatgaggtcactctttcaaaagctcttgaaggaagacgtgaattgtaagggaggaaaaggcaaggcatgggttttcttcgcagaaatacattaagaaaagagtttgacgagaagctgatagaacagctctttaaacaaaaagaagaatggaacagacagaagagtctggtcgagaaaagtctcgagccctccgctgaggtgttgtttgagctgaaagtcgctgaatctaaatactttttctatttgaaagaagcgaagcagcggaatttgaaaatgagcagatggaagtaaaaggtctattctccggggtcttctcataagcttgtactaaacaagcgagggggaagattcatggagccttttttcattatcggtttgattgtcggtctggttgctttgctttttttatggggagtatcttcaaaaccgctaagatggattggtgtgactgcgattaagtttattgccggtgcgattctgctggtgggtgtgaatttgttcggcggcagtcttggtattcatattcccgttaacctgattacaaccggtatcagcgggattctgggaattcccggcattgcggctttgattgtcattaaacgcttcatcatttaatttgtcgattattgttgacatgttacatcaagggtggtattctaatatacgtcgctgatgacgaaacgaatttttgaaaaagaaattttaaaaagttgttgacgacactaacactgatgtgttaagataattaagtcgcttcaagagcggcggacaaagttctttgaaaactaaacaagacaaaacgtacctgttaattcaaagttttaaataaatcgcacagtgatgtgcgtagtc

SEQ ID NO: 41 - DNA, 13354 bp, Bacillus velezensis
  source 1..13354: mol_type = genomic DNA
tgcgtcagttgattccggctttccttccgctgtttctgagatggtaaactctactttctccgtatttaacacatagctgtcgggcgctttcgtttcaatgaaggcgtaatgaccgggtgcaaggccggatgtttctacttttccgtccttatctgaaaccagatcttctttaaccgtgtttccatcactgtcgacgattttgaaaactgcaccttcaaggtttcggccctccgcatcttccttcgtcagccggacagagcctttatagttgacggccgttcctgcgtcagttgattccggctttccttccgctgtttctgagatggtaaactctactttctccgtatttaacacatagccgtcgggcgctttcgtttcaatgaaggcgtaatgaccgggtgcaaggccggatgtttctatttttccgtccttatctgaaaccagatcttcctgaaccgttttaccatcctggtcgacgattttgaaaactgcgccttcaagattcccgccgtctgcatctttcttcgttaaagcggcttttcctttataattcaccattgatcccaattcaacatcaggtacttgattcttttcgttctttgcgattgagaagtgaatggcttttgtgtttacgataaaccctgatggggctttcgtctccatcagccgatagtatccggcgggcaaaccgtttatctcaactttcccatttttatcgctttcaatattattttttatcagagtataggtgccatcgcttgattttttctcaagcttaaatacagcaccggccaaaggattattgttttcgtcttttttgataagcgtcaccttatttttttgatttatgactttatagagtgctcctgctgcggaggatttgccgtcaatcgtaacggagaccccgtttacataagcgtcgctgatggtgtagccgtccggagcttttatttctttcagtacataggttccgtaacggatattcccaaacgcaagtttaccggcatcgtctgttgtgcccgtacgcagcagctgcttgccgtctttagaccataattgaaagccggctcctgaaagagatgttccgtctgatcctgttttagatatcgtcaggcttcccttctctcctgatcctgagccgccgccgcttgaaatggcgacaaacactgagctgttgttctcttgggtctgctcctcaacatttgtccctgatatcgacactttgttgctgacctgaccgctgctgccggaaatattaatgagagaacgatattgtatgacatacgcacgatcgatttgtttatagccgcctataaaggtaaggacaaatgattgttcaccggtggcattgtcagttttcatatctactttatagtccttatctttctcaagctgcacatcacccggaataagatttccgctgctgtctttcataacgccgttctcattatattttgcttgatatactttaaaagaatcttcatctattatttgattctcatccggtgtgtctttgacttttacgtcatccagtgtcgattggctggcattgacattgatgttccaatcgatattgtttccgttctgtttgccgcctttagaaatcaggtttcctccgtttgcgatggaaactgaacccgtcagcgttcggtctgcatggtcattattaaagtactctgctttgtttgtgtattgattctgtttgatgacctggccttttattgacgttttaaattcaatcaggtatggtacagcgtcatctgttttgagacgtacgattaacgtatttttgttgccgtctgacggctcttctatttcatattttgaaggatccagcgcctctccttcagtgatggagccgtttttgctgatggtatacgttttaacagcaaccgacccatgcaaaaattgctgaccatctgtgatcgtatcttttatataaggattctttgaaggttcgccattgtaattgatgccgactttccatatgatttcttttgaaacggcgttgtatgagccgtttttgaatccgttatgggacgtctgattgttcggtgtgaagccgcttgattccttatttgtgcgtttgttgccgtttttatcggtccatgtggactccgccgtattcttaatcgtttcgtttgaaaagtcagcgttgaattttgtcgtatacgtgatcttaaactgactgtttgtttctgcataatccccgatcaatgctattgtaaagccttgatttccggatttttttgttaatgtatagtctgttccttctttcagcgttttgttttcagtcgtgtcttgcatgtgaaatgaatcgtcaatgagcgccaggcctccgctggtgaattgatcatccagcgtccagtctttcattgtgtaaccgtttttattaactgtgattgtccaatcaaccgtcttcttctcatagtctgcgtttgaataatgtttaatcagattctgctgaatggcggttcccggagtttcctttgattcccctgtatctgtcactgctgtgttggtgtatttgacaggactgtcaataatgaccccatcgttgacttgagattgataaatgatcttatatgctcctgtgacagtttgcttgaattttatgtcaaagccggtcccgttatcagtcagcgtataatcctcaccctcttttaatggggcgccctcttgttcgctgccgttttggctgaatgtaatcggaaggactttcaatgaaccgggaacaagatgcagatcgtctgatccgaacgtatccttgatgccggctttggattgatcaatctttttctcaccgtagttgtacatcacagcccagctgaacgtttgggtttctcctttataacctatcgaagatttttctattatttttccgtaacccgctgttacggaagcttccgcagaaatcggctccgcattttctccgctgaatgccgccttgtttgtcagcgtgatgtttccgcctttacccggctttgcctcatctttaatttccgtgtcatatatgagccggcaggctgaatcgatcgtcccggcgaaggtgacattaccgttttcgtcaacggtataacctgaagttatctcatttccctgactcaccgagccgtcaatattgacattcagttgatacactttcacagagcggaaagtcaattcgtccggaaggctttcagtcaatttcgcatgtttaacttcttcttcctttttattaagatcaaccgtccacgttacctttccgggattaatgcctttatccaatgatcctgatttctcaatggttttattgacattcggtttaaaataaaccgttacgtccggcgtatcagagttaaccggaaacttaatcttttgtgtggttgatccttttatttctttctgattgaattgggtgtttacatacaatgaccccttgacgttagaatcttcttttacctcgccgttaaacgtcatgatgacatggccgctcgtattaatggaaaaagttccgtacgtactgtcgccgtcggtcaatggctggttcgtaatgtcattatgcatgataaattctttaggcagatcaaattcatatcgatcaccgtcgtttattgtttttcccagctcattcggaatcgcccattgaatggtgatatttgccggagaattcgtattcgcagggttgtttttgtcatatggttttcctttttcatccgtcaatttcacatcagttaaaatattttgcgtaatccggcttcctcctgattgaaggcttttagcggcagatttgcttgaaatcaccatttttgattgactgcgtttagcagaaggttttgatttcgttgtctgttctgctttatccccgccgtccgcaggtgctgactttttctctgtcttttcctgaggttctgcaggtgttgaagaggtgtttttttctgtttcggaatccgttgttccgtctttcttcacaggtattaacacctgctgggtcttgccggcatccagttgaaaaagagcttttgccattttcgtctcatctgttatgtcgggagtaaacttcgccgacagtgtaatggagccattggcatccccggcatccgcttcagcatcattcactttcacttccagcgtgctgcttttcgcttcagctttatatataccgatcacccgatcagctgatttcagctcaccttcggcatcgttatctaatgtaaaactttccggaatctttaaggtgatattccggtcacttgcatcttccttgttttttagtgaccattcgtatgtcagtgtcactttatctcccggtgccaaagcgggctcactcccttttgacccgtcaacagtctgctgtctgccgtctttgactgcaactgaatcaaagaacccgctctcgctttgttgtgatccggaagcggctgcgatcggagtaaagctgacaacttggctgaagatgaaaaacagcgtgaagcatgaaattaatgccgccctcagccttttgctttttttcgggctgaacgaaaagttcctcactcccaatgtcttattcctccccttttatatagacttacgttcgaacaagccggtaagcatgggattctccttatccgaaccaaactacattgtatgaaatcggcctatacaaattctgtacatgggatcatttcagaaatagcgcacaaaaaaagaccggcatcagccggtccggtcattcaatcgtcaattgattttatccttcaattgtttatagcgttcgtattcctttatcgcctcttctacctttcccagtttattaaataactgcagtttgtattgtataattttatcgtcaccgggctctattttctcaacctgcaggcaaatgtccatcgcttgatgatcgttcttctcttggatgagaaaaccaatcagttcgtacgctttgctgagccacagatgggcaagacgcgctttttccggctccgcccacagatagccattctccatgaagtaatggttcttatatgacatgacaatgttcatgtgccgggttagtgcagctgcgctgagcggaggagcctcttttaatgttttttcccattcaactgtatcaacctttactccggaaagccggagaatgtatcctatatcggtattttctattgattggctgaagggcagctgaccgattaatttccgtatctgatatattgtcgaatagagctgggtgcttgcttttgatatatcataagcaggccaaaacatttccatcagcatgtctttactgactgtgcgcccttgattaagaagtaaaaatgcatacagttcacgggctttggatgttctccacttgactgttatgtatgttttgacaccatttaccgattgataaaagtccaggttcccaaaacattgtataacataatccgtcccggtattctcttctgccgtcctgagttttttattcattcggattcgctcaacagttgtcagcagccgggtattgtcaaccggttttaaaagataatcgacagcatttaattcaaacgctttgatcgcgaattcattataagcggtgataaaaataacttggatattttcattgagctcctgaatcgattcagcaagctcaataccgtttatcccgggcatttcaatgtcaagaaacaccgcatcagctgctgaaagctccgaatgctccagaacttccgccggatcttgaaacgttataatagattgaaaggcgtttgtccgctcaagcatacgattaaaatgaagcaatgccagttcctcatcatccacaattaacgctttcaaaccgcatcccacccgtcaatatagatatatctgaaaataatttcaattataccatgcctaatgccctatatagttggattctttttctttctcttgttgtattataacgtttgtgattacaatatttatacattacataggataatagaatgcccctgaatgggataaaggagtaatgatgtgaaagaaaaatttatttcgatttcgattatttgcggctatgccgctttctttatgatttttatggtcctgaattatttttcaggatcatccctccctcaagcggaacagggcgtgatcaatctggaaaagtgggattttcaaaaggatggaaatgtccagctgaacgggaaatggattctatatccaaatcagatgctatcaccgcaggctcttcattcagcaaaaggaaaaaatcccgtactcgttgatgtccccgtcaatgtgaagctgttcggaaaaacggccgacgtggattacggaacgtacaaactgacaatccgctcaaatgaagacaatcaggttctggggatcagcacatcttttatctacagttcaaaccgcctttatcttaatggaaaagtaatcggacagagcggcaatccttcagaaaaagctgattttaaggcgcagaacaaaccgtacagcagctttttcaggcttcgcaagggtgacaatgaacttgtcctgcatttttcgaatttcggaaaagttcccggctgggggatcgcaaaaccgataacgtttgggactcaggaacaaattatacgcgagaatcaaatttcctttttcaatgattccattatgattacggcttttttcattaccggtttatattttctcggcttttttctgcaacggacaaaggataaacatttattgttcttttccgtgatgtgtctgcttttttctgccattattcttatgatcgggaaagaaagaattatctttctcctctttccgtctatttcattttcattgctgaattccttgcgtatcatttcaaccgtgcttgtcagcatggcggtttttctttatctcttttatgcatacagagaaattgtctcaaaaacgacgatcaccattttaaccgctttatccgggatcatcttgatcactgattttatgtccggaagtttcattgaccatctctcatacattttacattctgttcttgccgttacgactctgttttatattacatatatttttacgattgccgccataagaaaaataaaaggaagcacgtaccttacactcgcatccgtctcgatgagcgcttttgtgattcttacgaccatttcagcttacagcggcaaaacggctttttcttttaattcgctctattcattgccgacagtcatcgctttattggcggtggttcttctgatggcgcagcaattcgccggagctttccgggacaatgaagtcctctcacggaaattagtcaaaatcgaccaactgaaagatgaatttatcgccaaaacttcacacgaattcaagacgccgctgaacagcattattaatatatgccaaacccttgtagccggcagaaaaaagaagacgatagaggaagagaaagaaaatatgcagctgatcatccgtatgggctacagactttctgatctcgtaaatgatattcttgatttggaaaaaatgaagcagggtatgctgcagattcgtccggttcccgtcgatgtgcatgccgtcatatgcagtgagatgaacttctaccggcttttatccaaacataaaaaacttgccattcttaatcatgtgccggacggcctccctttggtgcttgcagatgaaaaccgattccggcaaatcttaaccaatcttattgaaaacgcaatcaagtacacatccgaggggaacattattctttctgctgaaagcctgaatgacaaaatgattcaaatcacggtggccgataccggcagcggcattcctgaggctgatcttgaaaccatttttgattcttttcagcaagcgggagggacggaagaagatggaacgggtttaggtttaagtattgtgaaacagctcgtcaagctccaaaacggggacatctgggcggagtcagcggcggcgcaaggatcagcctttcattttacgttacccgccgctcaaattgattctttaccggaagcaaagaccggccttcctaaatcacagcccggacagagaatgtcggatatttcgctggtcacgccttatcactcagaaaaaatcgatgctccgacgattctgatcgtcgacgataacatcgagagtttgaaaattttaacggatatgctggaaggtgttccttataacgtaatcgcagtaaaaagcggaaaagaggcgcttcaagctgtctcttcctcgaagcttgacctggtcatattagacttgatgatgcccgacatgacgggttttgaagtctgcacaaacatccgcgaaagattcagcatggtcgatctgccggttcttatcgtgacggcagccattatcagccatgacaaatacaaggcgtttcatgccggagcaaacgacatcttacaaaagccttatcattactctgaattcaccgcgcgtattaaaaatttaattttgatgaagcatacggctcaccaagccacaaatttagaaatggcgtttcttcagtcgcagattaagcctcattttctttataatgtattaaatacgatcatcgcgctcagccatttggatattgaaaaagcacgggaaacgactgctgcatttacaaactatttaaggatgagttttgattttcaaaacacttcggacatcagctcattcagaaacgaactttctatcattacgtcatatctttctatagaaaaaacacgcttcggcaaacggattgatatcctttttgatattgaacaggacattgacttcccccttccgcctttaatgatacagccattggtggaaaacgccgttcatcacgggatcagtaagaaaagaggcggcggacggataaagctgacagcgaaaaaacaaggcgaaaacacgtattttatcaaagtggaggataatggaaccggcatcatgccggacatacagaaagatattttgtcttctgatgttaatcgcagtgtcggcctgaaaaatatcaatcggcggctgaagcatttttgcggaagcgaattgacgatcaccagcaccccggatgagggcaccgctgtttcgatgatgattcacactcccggcacaacggatgattcgaactcactaaaaacgtcttcattaaaatactgattaactaccgaaggcatgtaaatacttctgccggctgtcgggaaattcccgtcagcctttatttacccaaaaagtaaaaacaaaaaagcttgaagaaaaagtgatatcttctccaagcttagatgatccgcaccagtctggccgtttcacttaagaaatcgtaactcccgcgcttgcatatcccgccactgtattaataagcgaaaggcctgtcgcagcggctgagaataccattaacagccgggtttgaggagttaccgcaatgttcagccctgtcgtgattccgttgctgatgatgccgattgacaatatgccggtgaggggaggagctaaagtgacggatgctccggggatcggcgtgaacgtattgttcggcactgtggaactgtataattgtgcggttatcgtaacagtcgagccgacaagcgacaatgctgcggttgtactgaaataagcggcaattgatgtaatggttccgcttctcggagcagaaaaagcaaagttcagcagagttcctccagccccggtaagatcaattgcacctccccctccgacattgacgcccgtcacagaattgccgaacccgacaaggctcaccgttccgattaatccgccggcaatggtcgtcacggcagtgggaagacctgaagcataaggaatgatcgcgcctgctccggtggcgccggttactcctgttgctccggtggctcctgttatcccagttgcgccggttactccggtagcacctgttactccggtcgctccggtgagcccggttgctccggtcgagccggttactccggtggcgccggttatcccagttgctccggttatcccagtggctccggtgagcccggtggctcccgttaccccggtggcgccggttactccggtggctcccgttattccggtcgctccagttattccggtcgctccagttattccggtcgctccagttattccggtcgctccagtatccccggttactcccgttaccccggtcgatccggttactccagttactccggtggctcccgttactccagttactccggttacaccggttgctcctgttaccccagttgcccccgttactccggtggcgccgggatctccggttgttcccgttaccccagttgcacctgttactccggtcgctccggttactcccgttaccccggtgagcccggttgttcccgttgccccagttgcacctgttactccgatcgctccggttactccagtggcgccggtgagcccggttgctcccgttatcccagtggcgccggttactccagtagctcccgttaccccagttgtacctgttactccggtcgatccggtgagcccggttgctcccgttatcccagttgcgccggttactccggtcgagcctgttactccggttgagccggtgagcccggttgctcctgttattccggtcgctcccgttaccccggttactcctgttgatcctgttgccccggttgctcccgttactcccgttaccccggttgctccagtatctcctgttactcccgttaccccggtgactccagtatctcctgttactcccgttactccgttggcgcctgttactccggtggctcccgttattcccgtcgctccggtgagccctgttactcccgttaccccggttgctccagtgtccccggttgctccagttgccccggttgctccagttgccccggttgctccagttgccccggttgcgccggtgatcccggttgctcccgttactccggtcgctccagttattccagtatccccggttactcctgttgctccggtcgctccggtgagcccggttgctcccattactcctgttactcccgttactccggtggcacccgttattccagttgcgccggttactccggtggctcccgttatcccatttgagccgattgctccagtcgagccggttactccggttgcgccggttactccagtatccccggttacaccggtcgctccggttactccggtggctcccgttatcccagttgcgccggttactccggtcgagcctgttactccggttgagccggttactcctgttgctcctgttgccccggttactcccgttaccccggttacaccggttgctccggttactcccgttaccccggttgctcctgttactccggttactccggtcgctccggttactcctgttgcgccggtgagcccggctgctcccgttatcccagtggcgccggttactccggtcgagccggttactccggttgctcccgtggctcccgttactcccgtggcgccggtggctccagtagcgccgggatctccagtgacgccggttaccccagtcgctccggtattcccagtcgagcccgtagctccggtgaatcccgttgctccggtaaaccccgttgctccagtgaatcccgttgctccagtgaatcccgttgctccagtcagccctgttgctccggtcagccccgttgctccggtgcaccccgttgctccggtgaagcctcttacatgaaaatgatttggatgacagcatggacaccatctttcatgacagcaagagttttcgcaacagaatccatcacagcaatgtgcccgattttgataactgcgcctttgatttcttcttttatgttgaaaatgacagcaacaatcattgcaattccggcagtcgtaatcccaagagtcgtaactgttataccaagtatctccttttctcattacaccacctctatttgcataatatttccacaagaaaaaaaggtgtggcaaaatcccacttctattgggcaaattttcgaatggtctttaaggctgcatcatgcacagcttttacagaaaaaagacctaactgtgcataagtcaggtctttcatctttaaaatatcagtctgctgttgtcattaggttgtcgggaaacttatgctgttaaaatcgatattgagagcagttgctgtcgttaaattattagcagttgtgaaaataaccctgagctggtaagtgttcgttcctgcggtcggcgcagtatccactgttgtatcagcaatcgaaaaactatccgtagctccgagagtactagttcgcgacagagttcttgtatgaatttgcactgctcccctatataatctcacttcaaaaacaaagtttgaattcgctgcagttgttaacgcgacactgagtgcataatccagctttacattctgcaaagcattaactgggattgccagcgtagcaacgggaacttctgtatttaacggcggataaacagtgagcggcccgttggttcttgtgaagagcaaggttggtgtactgcctgtggcgccggttgggcctgttgaccctgttactcccgttgccccagttactcccgttgctccggttactcccgttgctccggttactcccgttgctccggttactcccgttgctccagtcaagccggttgggcctgtcgatccggttgatcctgttggccctgttgctccggttggtccggttggtccggtcgctccggtgagcccggttgctccagttactccagtcacacccgttgctcctgttatacccgttgctccagtcacacccgttggaccggttgggcctgtcgatcccgttgggcctgttattccggttgtaccggttgcgccagtcgctccggttgagccagtaacccctgttggtccagtcacaccggttgggcccgtcgcgcctgttattccagttagccctgttactccagttgcgcctgttgctccagttgagcccgttattccggtcgctcctgttgcaccggttgaacctgttgctccggttatccccgttgctccagtcactccagttgctccggttgaacctgttacacctgttgggccggtttctccagttgctccggttgcacctgtaactccagttgctcctgttgctccagtcggtccggttgatcctgttgcgccggttgggcccgttattccggttactccggtcgatccggttgatcctgttggccctgttgcgccggttggtccggtgagcccggttgctcccgttactcctgtggctcctgttactcccgttgctccagttagtcctgttacaccagttattcccgttacaccagttggaccagttgctccggttgaacctgttacccctgttgcgccagtcgctccggttatccccgttgccccagtcactccagttgcacctgttgatcccgttactccggttgcgccggtttctcctgttgctcccgttactcctgttgctcccgttactcctgtggctcctggttc

SEQ ID NO: 42 - DNA, 9388 bp, Bacillus velezensis
  source 1..9388: mol_type = genomic DNA
aaagaccttgaaccgattctcggcatgttcgtcaacacgctggccatcagaacggagccgaaaggagacaaacggtttaccgattacttggcggaagtccgccaggcggcgcttgaggcatatgagcatcaggactatccgtttgaagagctggtggaacggctcggggtgcagcgggacatgagccgaaatccgctgtttgacgttatgtttgtgctccaaaatatggagcgtgaatccctggtgttaaataagctgcatttggctcaagctgcggatacaagtcataaaaccgcaaagtttgatgccacgctttacgcgtcagaagggtctgacggttccatcagctttgattttgaattcaatacagatatctatcaaaaacagacaattgaaaaatggctatcttattttacccgtattcttacaaaagtaattgaaaaccaagcgataccgcttggtgacattcacgtactggataatgctgaaacaaatcgcgtcatttatcagtttaatcagacgaaaagcgattacccaagacacgaaaccatcagccgtttatttgagcggcaggcaaaagaaactcccgatgcccgggcagttgtttatgatggacaaattttgacataccgtgagctgaacgaacgggctaacagaatagcggcggctctccgatcaaatggcgtcggtccggaaagcgttgtcgccttattaaccggccgcacaacagagcttgcctccggaatcctcggaatattaaaagcggggggcgcctacttgcctatcggtgacgatgtgccgcgggaacgggctgaatggatgcttaaagactgtaaagctgatattcttctccaatctgataaacttgacggtctgccgctttcaggaaaacgtttattcatagaggatattcaaacaaaggccggattgagttcggaaaatcccgaaccgctcggcggacctgaatcgttggcctacatgatttatacgtccgggtcaacaggtgcgccaaaaggcgtcatgattgaacagcgaagcgtgatccgccttgtgaaaaacagcaattatattgattttacgccggaagatagactgttgtttacttcatcattaggatttgacgttacgacatttgaaatattcggtccgcttttaaacggcgcttctttatatgtaagtgaccaggaaacctatctcgactctgatgttctggaaacatttatacagcaaaacggcattacgacactgtggctgacatcgtctctgttcaaccatttatcagaacaaaatgaacacgtgttttccggattatcccgattgattatcggcggggaagcactgtccccgagccatgtaaaccgggttcggagtgcgctgccgcatctctcagtatggaatggatacggaccgactgaaaacacgacgttctcgacttgctttttgattgaacaatcatacgatcattcaatcccgatcgggcgcccagtcggaaattcaaccgcatatatcataaacggcaggggaacaccgcagccgatcggcgtcatcggcgaattatgcactggaggagacggtgtggcaagaggatacttcggccgccctgagctgacggaagaaaaatttgtccccaatccttttgttcccggagaacggatgtaccgcaccggagatttagccctctggctgccggacggaacgatcgaatatgccgggcggatggatgatcaagtgaaaatccgcggttatcgggtcgagctgggagagattgaagccgcactgaggagcctggacggcgtgaaagaagctgccgtgtcagtcagaaccgggcagtccggcaataaagaactgatcgcatatatgagtctgcaggcggacatggatacagaaaaagtgcgttcttcactgtctaagcaactgccgaattacatggttccggcctatatgatggaacttgagaagctgccgcttacgccgaacgggaaattggatcggaaaaatctgcccgaaccggagctcgcgcttcaaaccgcgtacacagctccccgcaatgagcttgaagaacagctttccgtgatctggcaggaagtgctcggcacaaaacaagtcgggattgaggactcattttttgagctgggcggcgattcaatcaaagcgctgcaagtttccgcacggctcggacgctatgggtggaaaatgacggcaagtgacttattccggcacccgtccattaaggaactcgcgcctcttatccggaaagcggaaagagtcatcgatcagcggccggtggaaggagacataccttggacacccgttcagcactggtttttatcacagcggatggaaaacagaaatcatttcaatcagtccgtcatgatgttcagctctgacgcattgcataaacagccgctcaaagaagccttggagcatcttgtcattcatcatgatgcactccggatcactgtcagtgcagaaaacgaaagtttcagacaaatcaatcacggtattcaaaaagctgaactgtacagcttggacatttgggatctgtctgggacagatacttgggaaagagaaatagaaactgaagtggctgcgctccaacagcggatggatattgaaaaagggccgttattaaaagccggctggttcaaaacccggtcgggggattatttattcatcaccgtacatcacctggcggttgacggagtgtcatggcgtattctgctggaggatttatctgccgcttacactcaagccgtaaaaggtcagccggtccagcttccgccaaagaccgattcgtttaaacaatacgctgaacggctttcagaatacgcaaaaagcagcaagctgatgcatgaagaagaatattggcgttttattgaagaagaaacagccgccgaacttccttatgaaaaaccgcagcatcagacgggagccgacagcattcggcaaacgataagctttacgcttacagaagaagaaacgtccgttttgcttcagcaggtcaaccgggcctaccataccgatacgcaagatattcttctgactgccgcagctttggctttacgggactggacagggggcggcagactgcgcatcgcgatggaagggcacgggagagagcacatcatgccggagctcgacatcagccgcaccgtaggctggtttacctccatgtatccggtgctcattgacttgaacacagcaggcgctgagcttggaacggcggtaaaaacggtcaaagacacactcggaagaataccggataaaggaataggctacggcattttaaaatacatgacaccgcctgaacaaaaaacaatccgcttcagacaagcgcctgaaatcagctttaactatttagggcaattcaatgatacagaagatcagcacacgttcagtctgtccggtcttgcaagcgggcacgacatcacgccgacatggcagcgggaacaagcggtggaaatgagcgcgatggccgcacaaaacaaacttcacttcagtttgagctatccgccgagccgcttccgcaaagaaacgatggaacagctgctgcaaaccttacagcaatatttgcgtgatattatggcgcactgcaccggcaaagaggaagcagaaaaaaccgttagtgattttagcagcaaaacgttaacatctgatgatttggacagcatagcgagttttgtcgaggaactgtagaaaaaggcgacggggagattataacatgacaaaaaagaatgcaattcaggatatttatccgctgtcttatatgcaggaaggaatgctttttcattccctcctgcaaaaggaatcacaggcttacgccgagcaggcctccttttcaataacggggaaggttgacacccgcgtgtttgaagagagcgttcatgcccttttcgaaagacatgatattttcagaacgatctttatcacccagaacgtgtcagtgccgcagcaggtcgtattaaaagagcggaacgtcagcattattgaggaaaatctcactaatttaaataaggctgatcaaatcaagtatatcgaagaagccaaacgaagagaccgtgagaaagggtttcatctgcaaaaagacatgctgatgcgggtgacactgcttcaaaccggtgaatgtgaatatacgtgcatatggagtttccatcacattattatggatggctggtgtctcggaatcgtgctgaaagagttcttccagatatacgcctcgcggctccgccgaacaccgttaacgcttgagcccgctgtgccgtacgggacctacatcaagtggctgatggagcaagataaagaaaaagccgcttcgtactgggagcgataccttgaaggctttgagcagcagactgttctgccgaagcagaaaaaagccggcgaaagcagacaagaggaagtgacgttttccttttcaaaagaggacacggctaagctgaaagagctggccgtgaaagaagaggtcacgctgagcaccattttccacacgctctggggcattttgcttcaggcgtataaccagacagaagatgcggtttttggttctgtcatttcgggaaggccttctgaaatcgaaggcatcgagcgaatgatcggcctgtttattaataccgtgcctgtccggatcagcggggcggacatcccgtttcaaaagctgatcaaaaacgtgcaaagggacgctttgaaaggacaggcatacagctatcatccgctttatgatatacaggcgaattcacaggtaaaacaaggcttaattgaccacattctcgtctttgagaattatccggttgaacaggagtttgatgtgctgaacagcaagggagacacgaaagacctttttcacatccatgatttcagcatggaagacgaaaccaactacagtttttacctgatggtggcgccgggtaacgagattcatttgaaaatgagatacgattcaagcatgtatgaccgccaatttattgaaaatatcaaaggccatttggcatacatcgtctcccaggttctcgacaaaccggacatcacgcccgacaagcttgaaatcatcaccccagaggaaaaagcgcagctgcttgcgccgatttctgaagagaccgaaaaacctgaatatgacacggttcatgcgatgtttgaaaggcaggccgcaaaaacgccgaatcaaatcgcgattcggtatgaaggtgagtcagtgacgtacaaagaactgaacgaatcggctaataagctggcccgcctgctgcaaaagcgcggattaaagcgggaggagccggtaggcgtcatgcttggccgttccccttctttagcggcggccgttctcggtattttaaaagcaggcggcgcctttgttccgatagatccgggcagtccaaaggagcgtatccgatatgttattgaaaacagcggctgcgtccatgttgtaacagagcggcagcagtcagtccccgcggaacaagcgctgcaagttacatacatagaagaggccgggacggaagcggacggaagcaatgtgcaatccattaatacggcggacgaccttctttatatgatttatacatccggtacgacagggaaaccgaagggcgtgctgatcgaacataaaaatatggccaacctgctttctgaccaattgacgaacacagacattgatttttgcacaaatgtgctgcagtacgcatctttggcgtttgacgtctgctatcaggagttattttcagtactcttgagcggcggcaccctctgtatcgtgcccgaatcaatcaaacgggacgtttctcagctgttttcgtttattgatcagcacaacacggaagttgtgtttttcccgactgcgtttgtcaagatgcttttcaatgaagaaggttatgcacagtcttttccccgctgtgtgaagcatgtcattacggccggggagcagctgaccgtttcgcgtttgttcaggcagacgctccgttcacacggtatgcagctgcataatcattacggcccgtcagaaactcatgtggtttcaacgtatacgatttctgcgggagatgacatacctgaacatccgccgatcgggaaaccgatccatcataacaagatgtatattctcagcaaaaacaggcagcttcagcctctcggaattgcgggagaattgtatatttccggagcgaatacaggaagaggctatgtgaacaatccggcgctgaccgaagagaaatttttgcccgatccgttcagaacggacgccgtcatgtaccggaccggagatttggcaagactgcgtgcagacggccaaattgaatacatcggccggacagatgatcaagtgaagatcagagggtaccggattgaaccgaaggaaattgaaaccgtcctggcaaatcatcatgccgtgaaagaagctgccgttctgattcaaacgaatgagtcgggcgaaaatgaattatgcgcttactgcagcgtctcacaagcgactgatccttctcagctgcggagagatttggctaaagagctgcctgagtatatgattccggtcaaatgggcttttgttgactcaattccgctcactgcgaacggaaaagtcgatcagcgggcccttccggaagcttcggcgtacgcagcgggccgacgatatacagctccccggaatgtgacggagctgaagcttacccgcatatgggaagaagtgcttcaaaccggcccgatcggcgttcacgatcactttttcgagcttggcggccattcattaaaggcgacggcactcgttgcaaaaatagctaaagagtgcagtgtgcaaatcccgctgagcgatgtcttcagccatccgactgtagaagaactcgccaaaatcatcagtgaagcagaagagaacccgttcgcatccatagaaaagacagaaatgaaagaaacatatcctgtctcatccgcccaaaaacggatgtacgtccttcaccagcttgaaaatggcggtgtcagctataacattccagccgttttagaggtgagggggccgtttgaccgagataggatggaagccgtgttcaaggaattgatcgggcggcatgaaccgctcagaacgtcctttgaagaaaaaaacggcctgcccgtgcagaggattcatgacgacgtgccgtttgcatttacaaaagaacaatcagccgaagcgtttatccggccgttcgatctcggcaaagcgccccttttccgggcgggatttgtccaaatagaaaaagaccggcatctgcttttagctgacatgcatcatattatttcagacggcgtatccgtcaatcttttgatacgtgaattcagtgagctgtatgctgagagaagtctgccgccgttacggattcaatacaaagattatgccgtctggcagcaatcatttatggcgggcgccgcatatcggaaacaagaggagtactggctgaaccggcttgccggtgagattcccgtgcttgaattgccggctgataagccgcgtcccccggtgcggagtttttccggagaccgggtgtcatttgtcatcaatgaaaaacatacagctcagttgaaaaagctggcgaaagaaaacaaatgcacactgtatatgacgctgcttggtgtgtacacggttctgttagcccgtttaagcggacaggaagatatgattgtcgggtctccgattgcaggaaggcctcatgccgaccttgacgccgttctgggcatgtttgtcaatacgcttgctttcaggacgcgtcccgacggaagcatgacattcaaagaatatttaaaggaaattcgccaaacagcgcttgaggcttacgaacatcaggattacccgttagaagagctcgtcgataagctcggtgtgccgcgggacatgtcccgaaatccgctgtttgacacaacatttgcgctgcaaaatatggaacagcagaagcttagggcagccggacttgaactgcagccggcagacgtcagcctgccgatttctaaatttgacttatcactgtacatctctgaaaacgccggtgaattgtactgccagtttgaatacagcaccgatttgtttaagagaaaaacgattcaaaaatgggcgggattttttacgacacttgccgaaaacgccgcggctgatccgagcttggaattagacgatatttctgttttgacagaaaaagaagaagtgtctctgcttcaagatttcagcccctttcagaaaacagcgtttccgcttcatcagtctcttcatgatctgctggaacagcaggcggaaaaaacgccggaccgtcctgcgattttaactgatgacatttcgattacgtatcaggaactgaacgaaagggcaaacgagcttgcgcatcagctgatcaagcgcggcataaggctggaggataaaactgccattatgggccggcgttctcctgacatgctgatcggcatttacgctgtcttaaaagcaggcggtgcatatctgccgattgatccggattacccggaagagcggattcgctttttactgaaagacagcggcgtgaaattcttactggcagaaccagaacttttcgcaccagatctttttgagggagaaatgatctctctgaaaagcggacaaacaggaaaccctgaagctgcggccaaccctaacgttccggtaaaacctgattcattggcttatatcatctatacatccggttctacgggacgcccaaaaggcgtgcaggttgaacatcggtcagccgtaaactttttatactcactgcaaacgcgttatggattaagtgattctgacatcattttgcataaaacatcctactctttcgacgcttcgatttgggagctgttttggtggccgatcgcgggagcttctgttttcctccttccgcaaggcggcgagaaagaccctgaaatgatactgaacgcattggagaataaccgcataacggcggcccattttgtgccatccatgcttcatgctttcttggaatatataaattccagaaaacagccgatcaaaaagatctgcttaaaaagggtttttgccggcggtgaacaattgggcccgcacttggtttcccgtttttatgaccttctgcctggaacggaattgacaaattcctacggtccgacggaagcgacagtagaagcggcgtactttgatttgccgcaaggaaaagaatttcacaatgttccgatcggcatttccgggcataacatgcggctgtatattttaaatcaaaagaaacagcttctgccgccgggctgtatcggagagctgtacatcgctgggacaggggtggcccgcggctatctgaaccggcccgagctgacggaggagcgttttctcgatgatccgttttatccgggagagcgcatgtatcagacgggcgatatcgcacgctggacagaagacggccttgtcgaa

SEQ ID NO: 43 - DNA, 2348 bp, Bacillus velezensis
  source 1..2348: mol_type = genomic DNA
gggtgatggcgtgccttttgtagaatgaaccggcgagttacgatcccgtgcaaggttaagcagaagatgcggagccgcagcgaaagcgagtctgaatagggcgaattgagtacgtggtcgtagacccgaaaccaggtgatctacccatgtccagggtgaagttcaggtaacactgaatggaggcccgaacccacgcacgttgaaaagtgcggggatgaggtgtgggtaggggtgaaatgccaatcgaacctggagatagctggttctctccgaaatagctttagggctagcctcaaggtaagagtctcggaggtagagcactgattggactaggggcccctaccgggttaccgaattcagtcaaactccgaatgccgatgacttatccttgggagtcagactgcgagtgataagatccgtagtcgaaagggaaacagcccagaccgccagctaaggtcccaaagtatacgttaagtggaaaaggatgtggagttgcttagacaaccaggatgttggcttagaagcagccaccatttaaagagtgcgtaatagctcactggtcgagtgactctgcgccgaaaatgtaccggggctaaacgtatcaccgaagctgcggactgttcttcgaacagtggtaggagagcgttctaagggctgtgaagcaagaccggaaggacttgtggagcgcttagaagtgagaatgccggtatgagtagcgaaagaggggtgagaatcccctccaccgaatgcctaaggtttcctgaggaaggctcgtccgctcagggttagtcgggacctaagccgaggccgaaaggcgtaggcgatggataacaggttgatattcctgtaccacctcctcaccatttgagcaatggggggacgcaggaggatagggtaagcgcggtattggatatccgcgtccaagcagttaggctgggaaataggcaaatccgtttcccgtgaaggctgagctgtgatggcgagcgaattatagtagcgaagttcctgattccacactgccaagaaaagcctctagcgaggtgagaggtgcccgtaccgcaaaccgacacaggtaggcgaggagagaatcctaaggtgatcgagagaactctcgttaaggaactcggcaaaatgaccccgtaacttcgggagaaggggtgctctgttagggtgcaagcccgagagagccgcagtgaataggcccaggcgactgtttagcaaaaacacaggtctctgcgaagccgtaaggcgaagtataggggctgacgcctgcccggtgctggaaggttaagaggagcgcttagcgtaagcgaaggtgcgaattgaagccccagtaaacggcggccgtaactataacggtcctaaggtagcgaaattccttgtcgggtaagttccgacccgcacgaaaggcgcaacgatctgggcactgtctcaacgagagactcggtgaaattatagtacctgtgaagatgcaggttacccgcgacaggacggaaagaccccgtggagctttactgcagcctgatattgaatgttggtacagcttgtacaggataggtaggagccttggaaaccggagcgccagcttcggtggaggcatcggtgggatactaccctggctgtattgaccttctaacccgccgcccttatcgggcggggagacagtgtcaggtgggcagtttgactggggcggtcgcctcctaaaaggtaacggaggcgcccaaaggttccctcagaatggttggaaatcattcgcagagtgtaaaggcacaagggagcttgactgcgagacctacaagtcgagcagggacgaaagtcgggcttagtgatccggtggttccgcatggaagggccatcgctcaacggataaaagctaccccggggataacaggcttatctcccccaagagtccacatcgacggggaggtttggcacctcgatgtcggctcatcgcatcctggggctgtagtcggtcccaagggttgggctgttcgcccattaaagcggtacgcgagctgggttcagaacgtcgtgagacagttcggtccctatccgtcgcgggcgcaggaaatttgagaggagctgtccttagtacgagaggaccgggatggacgcaccgctggtgtaccagttgttctgccaagggcatcgctgggtagctatgtgcggacgggataagtgctgaaagcatctaagcatgaagcccccctcaagatgagatttcccattccgcaaggaagtaagatccctgaaagatgatcaggttgataggtctgaggtggaagtgtggcgacacatggagctgacagatactaatcgatcgaggacttaaccaatttgaatgtatg

SEQ ID NO: 44 - DNA, 1275 bp, Bacillus velezensis
  source 1..1275: mol_type = genomic DNA
tccattgtagcacgtgtgtagcccaggtcataaggggcatgatgatttgacgtcatccccaccttcctccggtttgtcaccggcagtcaccttagagtgcccaactgaatgctggcaactaagatcaagggttgcgctcgttgcgggacttaacccaacatctcacgacacgagctgacgacaaccatgcaccacctgtcactctgcccccgaaggggacgtcctatctctaggattgtcagaggatgtcaagacctggtaaggttcttcgcgttgcttcgaattaaaccacatgctccaccgcttgtgcgggcccccgtcaattcctttgagtttcagtcttgcgaccgtactccccaggcggagtgcttaatgcgttagctgcagcactaaggggcggaaaccccctaacacttagcactcatcgtttacggcgtggactaccagggtatctaatcctgttcgctccccacgctttcgctcctcagcgtcagttacagaccagagagtcgccttcgccactggtgttcctccacatctctacgcatttcaccgctacacgtggaattccactctcctcttctgcactcaagttccccagtttccaatgaccctccccggttgagccgggggctttcacatcagacttaagaaaccgcctgcgagccctttacgcccaataattccggacaacgcttgccacctacgtattaccgcggctgctggcacgtagttagccgtggctttctggttaggtaccgtcaaggtgccgccctatttgaacggcacttgttcttccctaacaacagagctttacgatccgaaaaccttcatcactcacgcggcgttgctccgtcagactttcgtccattgcggaagattccctactgctgcctcccgtaggagtctgggccgtgtctcagtcccagtgtggccgatcaccctctcaggtcggctacgcatcgtcgccttggtgagccgttacctcaccaactagctaatgcgccgcgggtccatctgtaagtggtagccgaagccaccttttatgtctgaaccatgcggttcaaacaaccatccggtattagccccggtttcccggagttatcccagtcttacaggcaggttacccacgtgttactcacccgtccgccgctaacatcagggagcaagctcccatctgtccgctcgacttgcatgtattaggcacgccgccagcgttcgtcctgagccaggatcaaactctccgataaagtagtttgactgactacgcacatc

SEQ ID NO: 45 - DNA, 791 bp, Bacillus velezensis
  source 1..791: mol_type = genomic DNA
acacggaagttaagctcttcagcgccgatggtagtcgggggtttccccctgtgagagtaggacgccgccaagcttttttattttatctaccatgtttttgtttatgaagcttataatattccgcagtagctcagtggtagagctatcggctgttaaccgatcggtcgtaggttcgagtcctacctgcggagccattgcttccatagctcagcaggtagagcacttccatggtaaggaagaggtcagcggttcgagcccgcttggaagcttatctaaatacgttgatctgaagcagtttccgcttgttatgggactgttattttttgtttagttcagtaaaaatctgttgctgattgtatcagttaaggtataggtatttagcgcgtcttctgatgaagcctttcttcaaggatgcaaaagagattaacataattaattgttaaacggtattgacttttatcaaaaccttgatataattacttttgtcataatgagcagtatgtttagattgatctgcgggttataccgtttggatttttactgaataaataataatacagtttaccgctatctgaggctgtattctggccatgctttacatttttacttgcggaagtagttcagtggtagaacatcaccttgccaaggtgggggtcgcgggttcgaatcccgtcttccgctccattttatcccaacgggatattgtgatattaattgcgcccgtagctcaattggatagagcgtttgactacggatcaaaaggttaggggttcgactcctctcgggcgcgc

SEQ ID NO: 46 - DNA, 680 bp, Bacillus velezensis
  source 1..680: mol_type = genomic DNA
gtaagccgcctttgccttttgaagcttctacttcagttccttcattcagttgttgaagttccaatacatctctcattcggttttacctccttttttattatttattacaactattgctaatagtagatgtatcaatgagtattgtcaagaagtgtccacccaactttttctacttcagcactagaagtactcagaaaatctttttttgttatgtttggtcttttatccgcagttgttgctaatagtagatgtgcccactaccgttgtgatcagtgtaagtaagccgcctttgccttttgaagcttctacttcagttccttcattcagttgttgaagttccaatacatctctcatttggtttcacctcctttttattatttattacaactattgctaatagtagatgtaccgatgagtgttgtcagaggtgttcacccagctgtttctacttcagcgctagaagtactcaaaaatctttttttgttatgttcggtcttttatccgcagttgttgctaatagtagatgtgcccactaccgttgtaatcagtgtaagtaagccgcctttgccttttgaagcttctacttcagttccttcattcagctgttgaagttccaatacatctctcatttggtttcacctcctttttattatttattacaactattgctaatagtagat

SEQ ID NO: 47 - DNA, 672 bp, Bacillus velezensis
  source 1..672: mol_type = genomic DNA
ttaacgggctctgactacttgtaggcacacggtttcaggatctctttcactccccttccggggtgcttttcacctttccctcacggtactggttcactatcggtcactagggagtatttagccttgggagatggtcctcccggattccgacggaatttcacgtgttccgccgtactcaggatccactcaggagagaacgaagttttgactacagggctgttaccttctatggcgggcctttccagacctcttcatctacctcgttcctttgtaactccgtacagagtgtcctacaaccccaagaggcaagcctcttggtttgggctggtcccgtttcgctcgccgctactcagggaatcgcatttgctttctcttcctccgggtacttagatgtttcagttccccgggtctgccttctcatatcctatgtattcagatatggataccactccattacgagtggtgggtttccccattcggaaatctccggatcaaagcttgcttacagctccccgaagcatatcggtgttcgtcccgtccttcatcggctcctagtgccaaggcatccaccgtgcgccctttctaacttaaccgttaaaaagaatcactacgtgatatcttgcattactaattgaatgtgaattacttctgttatctagttttcaaagaaca

SEQ ID NO: 48 - DNA, 550 bp, Bacillus velezensis
  source 1..550: mol_type = genomic DNA
taaaaagaatcactacgtgatatcttgcattactaattgaatgtgaattacttctgttatctagttttcaaagaacaacatctcgaagaatcgaatgatccttcaaaactaaacaagacagggaacgttctgtttataagacccaaggtcttatattccgttaaaatccttagaaaggaggtgatccagccgcaccttccgatacggctaccttgttacgacttcaccccaatcatctgtcccaccttcggcggctggctccataaaggttacctcaccgacttcgggtgttacaaactctcgtggtgtgacgggcggtgtgtacaaggcccgggaacgtattcaccgcggcatgctgatccgcgattactagcgattccagcttcacgcagtcgagttgcagactgcgatccgaactgagaacagatttgtgggattggcttaacctcgcggtttcgctgccctttgttctatccattgtagcacgtgtgtagcccaggtcataaggggcatgatgatttgacgtcatccccaccttcctccggtttgt

SEQ ID NO: 49 - DNA, 597 bp, Bacillus velezensis
  source 1..597: mol_type = genomic DNA
atgaaacctatgctgccttttgaaaaatattttggggatttagaactggtttatgcattttatggagctatgcctactggtgttactgtttcagaaactggtcgtattttcatttgttttccgaaatggggagacgatgttaaatttacggtggcggagataattggggataaattgcagccttatcctgatttacaaaccaatttggttaaccctgagaatatcaaaatgactttcatcagtgtccaaagtgtagttactgatggaagaggaacactttgggtactagatacggcggcacccaatttttctaaaccaattaaaggcggggcaaaattagtcgctgttgatttaaaaaccaatacaatcagaagagtttatacctttacagaagatgttgttcttccaacaacttacctgaatgatgtccgatttgattttcgtgttggaactgcaggttatgcctatataacggattcttcttccaaaggaccaggagctattatcgtcgtggatttagaaaccggaaacgcatttagacggttaaatggagagcaaatccaacttcaccggattcctattttataccgaaaatag

SEQ ID NO: 50 - DNA, 486 bp, Bacillus velezensis
  source 1..486: mol_type = genomic DNA
atgaatcgtaacagggatggttcaacttccccgtttaggctggcatccgacggtattgcgatttctcctgacggaaaggtattatttttttgtccactgaccagccgtcatctgttctcgatctcaacagaagccctgagagatagaaatatacaggacatggatttactttatcatgtggcgtattggggagaaaaaggcgcgtctgatggaatgattacagatgcaaaaggagccatttatgccggagattatgagaacaatagtattcgaaagatgctgccgaatggcacaacggaaaccatcgcacatgatccgagaattttatggccggatactttttcgattggtccggatggatacttatacgtcatcgtgaaccaattacatcggcaggctagatttcattatggaaaggacttacgacagaaaccttatagtttacttcgtatcaaaattgatgaatttcctgctcctgctttttga

SEQ ID NO: 51 - DNA, 429 bp, Bacillus velezensis
  source 1..429: mol_type = genomic DNA
atgaaattgacagagaaacagaagcgttttgccgacttttatattgagcttggtaatgcgactgaagcggctagaaaagcgggttacagccaaaagacagctaaatcaattggtcaagagaacctgacgaaacctgacatcaaatcctatattaaagagcggcttgctgaaaaggatgcggaaagggtggcttcacaagacgagattcttgaattcttaacggcagtgatgcggggcgagaagactgaacagattcccgtcggcatcggagaaggcgctcaggaattagaggataaagacccctatctaaaggatcgggtgaaagcagctgaactgctcggtaagcggcacggtatgtggactgagaaagttgatatgacaggcgaattcgctgtgcagttcattgatgactcaggtgatgaagaatga

SEQ ID NO: 52 - DNA, 264 bp, Bacillus velezensis
  source 1..264: mol_type = genomic DNA
atgaaaaaactattcaaatcaatcattttatcagctgcattacttacgggagcggtggccgttgcgccgtctgcttccgcagcatggtcaggctggcaaaatgaatctgggtacagcggccgggtgtttacggatgccacgacatacacggctggcgcttccacgatagactggaaagccgagaaaaaaggtgattccggcaagaggaactatatcggaacatttgaatcagctaaatttcaaagggggattcgatggcgctga

SEQ ID NO: 53 - DNA, 255 bp, Bacillus velezensis
  source 1..255: mol_type = genomic DNA
atggctttccgcctcttttttcacgaagaaaattttggcaaaacagtctcacagctgaaaaaacttgttgacgaaggaaaagtgaaatatttcttattatccggaaacaattcaggcaacacaaagcttgtctcatggattaaaaagaacggcacaaaaaactcagctgacccatacagcaccgaaaaaaacaagctcagcccggcaaggaatgacaggcggcccgggcggacaaagtcagcagactctgtatga

SEQ ID NO: 54 - DNA, 357 bp, Bacillus velezensis
  source 1..357: mol_type = genomic DNA
atggttaactcattgaaactagttcaaagagcggaattatgggatgagcaaaatgaaaatatagttgagaagttatacgtagatcacttaccaaacgatggcctacttagggaaattatacaggatgatactgtttttttggtgggaaaaaaaacaggagagtccacgatttttacaagggcccaagaatattctcgtataagtaaaagtgagatttccgcatatgttgatgtaaaaacaatgtacggtaagtcccaagtcaaagaactaaatgaggattcagattattgtaaaaccttactttgtaattgttttattaaatcaagtaataagcgacttattaaaagaagtgaataa

SEQ ID NO: 55 - DNA, 435 bp, Bacillus velezensis
  source 1..435: mol_type = genomic DNA
ttgagtcttttaccattaaactcagccttatgtcttatagaatggcgaaacttacaagctcctcacccgtatgaaacgagtgacacatttttaggaggcagacagttactgattttttcagccgtatttattttgctcagccttatgtttcaagtatttgccgtcaaagttctcaatttgccaaagcctgttaaaaagcagaagccgataaacggcacacatcgattaatcgaaatcacactgcttattacgggcatcgcagcggtgaattttttcaatgaaatgtacgtatttgcgggagttgttttcatgctattttgctgcaccggcataatggaatggcggcaccggcgggaggaaaagcaatatgtgtacgattcgttttacgcgggtctttctgccgcgcttggcgtgcttatttttttcatcagttag

SEQ ID NO: 56 - DNA, 261 bp, Bacillus velezensis
  source 1..261: mol_type = genomic DNA
atgcattcagaaaatcgaaaaggtaagcgtgtgaaggccggaagggcctcggtaaagacaacgcgaaaaggtacgtacgatctcgaatacatattcgatagactgtgcgatgccaaacgtgctgagaatgtcttcaggaaacgattgataagtacatgcgtgcttgttgatatttgtcggattatgctgaagagatcggagtgtccgcagacatacgtcatattgacgttgactttgcgcgcggctttgtatcgtggctga

SEQ ID NO: 57 - DNA, 126 bp, Bacillus velezensis
  source 1..126: mol_type = genomic DNA
atgaaaacatacaagattgccagcataccgggggacggtgtagggaaagaaacagttccgcaagcggaacgggtgttgaacgcaatcgccgaattacatggaggcattgcctttgatttcaaatga

SEQ ID NO: 58 - DNA, 375 bp, Bacillus velezensis
  source 1..375: mol_type = genomic DNA
ttgctgaaaaggttttttcttgtttttcttacgctgataatgtctatatttgctgtattcgcggctgctgaagagtctcccggcgatcgtgtcatttcttttgacgagcctatgattgtattgatctcactcggaatcatcttatgtttgttcattccgccattcgtcatgtccttttttggcaacttggttgtgagaatcatatccgggagtttatcaaagttttatcgtcctcacgtttggggggctcattccgattggatttctgattcccaatggctttttgacaattcttgctgccgtcctgggaactttggtcagttcagccagtgttgcggccaccttattcgttggcaggacagagaacacaagtaa

SEQ ID NO: 59 - DNA, 5589 bp, Bacillus velezensis
  source 1..5589: mol_type = genomic DNA
gtggctcctggttctcccgttgctccagttggtcctgttacaccagttattcccgttacaccagttggaccagttgctccggttgaacctgttactcctgttgcgccggtttctcctgttgctcctgttggacccgtgattccggttgggccagtttctccagtcgccccagttactccggttggtcccgtttctccggtcgcccctgttactccatttgctccagttatacccgttgctccagtcactccggttgctcccatggctccggttgccccggttactcctgttgaacccgtgattcctgttggccctgttgctccagtcggccctgttgctccagtcgagccggttgttcccgttactcctgctaggccggtttctccagtagctccggtttctccggttgcgccagtaactccagttggaccggttgggcctgttggcccggttggacctgttattccggttgagccggttacaccagtcgccccagttgggccggttgatcctgtaattccggtagggcctgttactccagttgaaccggtttctcctgttacacccgttggacctgttcccccggttgcgcctgtttctccagttgggccggttggaccggttgcaccagtcgagccggttgggcctgttactccagtcattccggttgttcccgtggttccggttgctcccatggctccggttgccccggtttctcctgttggacccgtttctcccgttgaacctgttgcgccggttaggccagtttctccagttgcaccggttacaccagtcgaaccggttgagcctgttactccagtcgctcctgttatccccattgacccagtcactcccgttacaccggttgtgccggttggaccggttgctcctgttgagccagtttctccggttgaacctgtcactcccgttgaaccagttgaccctatttctccggttggacccgttgccccagttgggccggttgctccgattgaacctgttgctccggttggaccggtctctcccgttgggccgatttctccagttacaccggttgcgccggtttctcccgttgaaccagttgagccggttgctccggttattcctgttgaccctgttacaccggtccctccggtttctcccgttacacccgttgaaccggttgggccggttgggccggttgagccagtcgccccagttactcctgttgctccagttatacccgttgctccagtcacacccgttggaccagtcacacccgttggaccagttgcgcctgttgatccggttgagcccgttattccggtcgctcccgttggtccgatttctccagttacaccggttgcgccggtttctcccattgagccagttgagccggttgggccgttttctcccgttgcaccagttactccggttgctccagtttctcctgttgggccagtttctccagttacaccggttacaccagtcgagccggttgttcctgttactccagtcattccggttggaccggcttctccagtagctccggtatccccggtcgagccagtttctccggttgctccagttactcccgttgcccctgttactccggttgagccagtcgcgccagtttctccagttgaacctgtcactcctgttgatccggttggacccgttgcccctgttattccggttgagcctgttgatccggttggaccgttctctcccgttgggccgatttctccagttacacccgttgcccctgttgggccggtttctcccgttgggccgatttctccagttacacccgttgcccctgttgggccggtttctcccgttaccccagttactccggtcgctccagttactcccgtcgccccggttacaccagtcgagccggttgttcctgtcgagccagtttctccggttgctccagtcggtcctgttgctccagttactcccgttgcaccggttactcctgttgagcccgtggttccggtttctccggttggccctgttacaccggtttctccggttgaacccgttgttccgattgggccggtttctcctgttatccccgttgctccaattgggccggtttctcctgttatccccgttgctccagttgggccggtttctcctgttatccccgttgctccagtcgggccggtttctcctgttatccccgttgctccagttgggccggttgttcccgttcccccggttacaccagtcgctccggttgggccggttgaccctgttgctcctgttactccagttgagcccgttgcgccagtcgatccggttactcccgtcgctccagtcgatccggttactcccgtcgctccagtttctcctgttgaaccagttacaccagttgcaccggtttctccggttgagccagtaatccctgttgctcctgttgctcctgttgttccggttgaaccagttgagccggtttctccggttgcacctgttgctccagtcactccagttgcaccggtttcacctgttgagccagtaatccctgttgcaccgctttctcctgttgaaccagttacaccagttgagcccgttgctcctgttgttcccgttacaccagttggaccagtttctccggttgggccagtttctccagttattcccgttgctccggatgcacccgtcgctccagtttctcctgtcgatccggtttctccggttgaccctgttgctcctgttactccagttgagccagtcgctccagttactcccgttggaccagttacacccgtcgatcctgtatccccggttggcccggtttctccggttataccagttggccctgctgctcctgttgggccagttactcccgttgaaccagttgatcccgttacaccagttggaccggttgatccggttgatccggttgcgcctgttgggccgattgcacccgttgcaccggttgatcctgttgatcctattgccccagttactcctgttgggccagtttctcccgttgccccagttactccagttgcaccggttgatcctgttaccccagttgggcctgttgttcctgttgctccagttattccagtggcgcccgttgcgccggatgcacctgtcgatccggtttctcctgttgatccagttactccggttgggcctgttgaacctgtcgatcccgttgctccggttgggcctgctgcgccagttgtgccagttgcgccggttgagccggtcgcaccaattgagccggtcaatccagttggaccagtcactccggctgggccagttgcgccggttgagccagttggcccgatttctccagttgaaccggtcgctcctgttactccggtgaaccccgttggtccagtcagccccgttgctccggttgaacctgttaccccggttgtccccgttacaccagtcgctcctgtatccccggtcggacctgttattccggttgacccggttgcccccgatgcacctgttactccggttggacctgccgctccggttgagcctgtttctcccgtcgccccggttacccctgttactcctgtcgatcccatgacccccgtcgggccagtcacaccagttgatccggttaaccccgtttctccggttgaacctgttaccccagttgtcccagttaccccagtcgctcctgtatccccggttggaccggttgctcctgttggacctgttactccggtcgctccggtgagcccggttactcccgttactcctgttgctcccgttatcccagttgctccggtttctccggtcgagccggttgcacccgttggaccagttacaccagtcgccccaattgggccagtcacaccagttgggcctgttgctccagttgagcccgttgagccagtcgctcctgtttctcctgtcgatcccgttggaccagtctccccagttgaaccggttgaccccgtttctcctgttgatccggttacaccagttgaccccgtgaccccagtcgggccagtcactcctgtttctcctgttgatcctgttgatcctgttgcccctgttactcctgttgggccagtttctccagttggcccagttacacccgtcgctcctgtctccccggtcggacctgttattccggtcgctcctgttgggccgatggggccagtagcccctgtggctcccgttatccccgttgccccagttactccagttgaccccgtttctcctgttgatcccgttgctcctgttactccggttgaacctgttaccccagtcactccagttgaaccggttgctcccgtcgatcccgttgcacccgttgagccggtggctcctgttactccagttgagcccgttgagccagtcgctccagttactcccgttgggccagttacaccagtcgctcctgtatccccggttggaccagttgctcctgttgctccagttactcccgttgaaccagttgatcccgttaaaccagttgatcccgttaaaccagttgatcccgttaaaccagttggaccggttgctccggtttctcctgttggtcctgttgcaccagtcgagccggttgttcccgttcccccggttacaccagttaccccagtcgatcctgtcgatcccgttgcacccgtttctcctgttggaccgttttctcccgttgggccggttgagccagttactcctgttgcgcctgttggtcctgttggtccggttatccctgttgcaccagttacaccggtcgctccgatttctcctgttgctccagttactccggtcgcaccagttgatcccgttgcacccgttgagccggttgctccggttgggccgatcgggccagtaacccctgtggctcccgttatccccgttgccccagtcactccagttgatccggttacaccagttggacccgtttctcccgttgagcccgttgctccggttgttcctgtaattccagttgggcccgttacaccagttggaccgatctctcccattggcccggtttctcctgttgaaccagttgaaccagttgaccctgttgctccggttgggcctgttctaccagctgagcctgttactcccgtcgacccggttactccagttggaccggtcgagccggttgggccggttgctccagttgaaccggtcgatcccgtgacccccgtcgggccagtcacaccagttgctccggttatgcccgtggcgcccgttgcgccggttgatccggtcgcaccaattgagcctgtcaatccagttggaccagtcactccgtcttggccagtaaccccggttgcccctgttactcccgtcgacccggttactccagttggaccagttactccagtcgggccggatgcacccgttgatcctgtgactcctgtcgctcctgttgtaccagttgagccggttgtacctgtggctccggttgaaccagttcctccggtcactcctcttggtccggttactcctgtggggcccgtcactcctgtgggacctgtaattcccgttacgccaggttcacccccggtttgcgccaatgaaacatcgtctattaaaatcgtgccggtagaaactttacttaatacaatgacggcagaggccgcgccagaaggcacactgcttgttttatag

SEQ ID NO: 60 - DNA, 624 bp, Bacillus velezensis
  source 1..624: mol_type = genomic DNA
atgttaaatgattatataaagcccagtattttatggacagatgtagaggatagaatagatgcaaccttttatcggacggactttgtagtgagtcttgataagatatttaagaatttaactattcctgtgttgcctaataggcagttgatacatgaattaacagattatactgcaaatggaagttttgaatcattgaaaaaaaatgtcagatatacaaatgaagcaggaatacctatgattaggggtaaaaatttgaagaatggtgttttagataaaactgatctcaattacgtcacagatgatacatatagattcttgaaaaaaagtgaattaaacgcaggtgacctattatttacaaaaactggaaccctcgggaatactattgtttggtctgagtatttcggaaaggcaacgttaggtgacaatatatttaaagttagatataaaaatggaatcaacccttattatattcatgcgtatttttctactgattatggctataaatgggtagaaagatttgcacaaggtggggtgcaaccaactattattttagcattagttaagtcagaaatttcggctgagcctttggtaattcctctgcctaacacttctgatcctttatag

SEQ ID NO: 61 - DNA, 1881 bp, Bacillus velezensis
  source 1..1881: mol_type = genomic DNA
atgcaagcattaattgaagagttaaaagaacaactcatgatgaaggggtatagtacattttctggaccagaaacacatgaagaagatggcacaacgatttttttagctagtggtgatgaaaaaattgtttatgtaaaggtatttgacaaaggagcagatttatcttttgaagtgcaagatgctgctttaatagaggcgcagtatcatgaagaggctccggatttcatttgggcatcaaatggtgaagtgaattattacgctgactgtattgagtcagatccactggcagaaataccggccgttattgatgtaacaaaaaaagaaaaacgacaaatttctaaacaagaagaatggtcaagaaagatgtactctactcttcaaaagcgatttgatgatttgcatgagcgcttatatggaccgggtggtgctgataatatcagcagtacgaacgaagccattgatgaattaagtaagttgctttttatggagactttccgcttgtatcatccagactatgtattaagagaaggagaaaatgcaggtctgcgaattttggatattttaaagtatcaatacataaaagagaatggaaaagaggctgttaggcaaattcgtgatgcttttaaagaaataaaaaaccatgaggattatgttgcggtaaatgatcttggtgaagaatgttttattttcagtgaagatgaatacattcgtttagaaaatcccgctaactttattgctgcttttgaaacgtttcaggaattagatgattttgaagatgaaaatggaaaccgagtgaaagccacattgaaaaatgtcagtgcggatattctagggcgtttattcgatgtattgatgcgtggtaaatatgataataaaattggtcaagctacttacttaacaccgagacaagtaactgaagcaatgattgaaatggttgtgcatgatttaacatctaacccaaaagaagcatcaaaattaatcacagctgatgaaaaaggtattcctacatttagaatgggtgacataacttgcggctccggtggattcttaataaaaggttatgaagcagtaaaaaaatatatgctcacccagtttacgggaacgatgaaagaaaaaatggagaagcattttgaacttatgaaagaacatagctttgttggagcagataagacacgaaacatggtattaaaagcacgcttaaatatggcgatgcatggattaccaaaagcgccaattttctgggtaaatgattcattaatgactgaatcattaaaaccgaagagttttgatttaatagttacaaacccaccttttaaatcaggatcagtttcaagtaaaactgatgaggggaaagctatattagaacgctatagcgagggaattgacgaaacaggcaaacctaaaaaagagggtctttgcttaggtgcaaaacctaatccaaaagggatttggaaagaagtaagttcgacagaccaagcagttttgtttattgaccgtaacttacagttgttaaaggatgggggacaattaataatcgtcttaccagatgggatattgagtaactcaggttacaaacacgtaagggaatatttaatgggtaaaaaaaatgaagtaacaggtgagtttgaaggaggtaaggggatagttaaggctgtagtttcactcccgacagtaacattccaattatcaggaaccggagcaaaaacatcttttctatatattaagaaaaaagaacatgaaaatgaaaaacaaggtcctgtattcatggcagtggcagaggaaattgggtttgatgtgaaaaataaaatagaagttcagctggggaatgatcggaatgatttattgaagattgttgatgtttataaaaagggagttaattag

SEQ ID NO: 62 - DNA, 366 bp, Bacillus velezensis
  source 1..366: mol_type = genomic DNA
atgagattgatattacatgaatacctaaccataccaaaaacaacagaacaattagtgaacattgcaaaagaacatggattgaattggaatgaggaacaagtaaaattatattgcttgcttgatccctctatatatgaaacagaatcaggtcaatgggctgttaaggttgatgaccgtcgtcataccatattaggagcaattgaaaaagcattagaaaaacggccgatgactaagattgaccccaatattattgaacagttaccgagtgatatgattgtgcctcataatgaggttattgaagtagctgttagtacagggcgttatgaatcaccgagagagaatattattcgcgtgaaacgaaaataa

SEQ ID NO: 63 - DNA, 120 bp, Bacillus velezensis
  source 1..120: mol_type = genomic DNA
atgaaagaggtgctagtacttcaacaatttgatgaaaagtctgaagtagagcctacggcatggactgttactctaacaactatttcagttacattatctacccttagcaatcattgctaa

SEQ ID NO: 64 - DNA, 2598 bp, Bacillus velezensis
  source 1..2598: mol_type = genomic DNA
atggacaaaaaattagtttatttccaacacatgagtgaagattcaaaatactatatagagaaaagcccaaatgcggagactgatccatacgaagtacataatatcccgaatcactatactgttagtacagaatataaatcaccgtggaagttttataataatccaaatcataaccttaaagaacaaggctggaaaatacacgtaagtgcgacaatgaataatgctcaggatatattgaaagttgtaagtcaaattatgttcaaacatcagatcccatttaaacatattaaagataaacaatctctatttaatatgaattcaaagcatggtaatcgaacttcatctggaaaatttatcgctatatatccttcctctaataacatgttcttcgatttattaaatgaactttatgaagaattaaaacattatgagaatgggccatacatactgaacgacaaatcgtggaaggatagtaatatatattaccgatacggtgcatttaagaatatttacaatgaaagaggagaactttgcattaaagacgaaaacggaaatttaattccagataataggaatccatattataaaatacctgatttcgtaagtgattttgatcagtttttagataccaagaataacttattagatactcaagatgtaagtaattttaatgattatgagttccaaggagtccttaggtttaataatggtggcggtatatatactggaataaggaaatcagatggaaaaaaagtagtaatcaaagaaggaagacctaaagtagggttagatggtcaatataatgatgcaattgatagattgaatatagaatacgaagcattaaataaactgacagaagttgaaggtgttgttaaagcgcttgattattttaaagcgtggaagcatgtgtttttagttgaagagtttgtagaaggtgtaactcttcaatcatggtgtgcaatcaattatccgttcaacgttgagactgataaaaacgaatacattagtaaggtaaaaaaaataattaacagcttgataaaagcaattaaactaatgcatagtaaaaatgttggtatgggagatttgcaaccccaaaatataatgattacccctgaattaaatgttaagattattgattttgaggctgctagtgctctctctgaagaaaatggagcgttgcaaacaattggctacacacataagaaaaataaaaatcataaggagcgagattggtatgcactaaaaaaagttttaagattttgtattctgccaataggtccagttgttgatatagaagaaactataaaaaagaaacatgatatgtggatagaggaggagtttggcaaagatgtctatcaatatgttgtaaacacagaaaatctatgcgacaaatacttatctgataccaaagaaaagagattcaacaataattatgacagtaaaatacaaaaagaaatggacatgtcaaaaattattaaaggattgagaaaaaatatagagagtaatattttacccaatagctcgctaattcatggcgatgtacgccaatttgtaatgccatctggaaagttaaatgtactaactggaggaactggagctgcattggcattgtacagatctggaaacatcaacaagcgagttcaggattggattgagattgttttacttgaaaatttgaatgtacttaatgatgatattgggttatttacaggaaaagctggtatcgcagtcacattgtatgaattgggatacacagagcaagctgtggacatattcaataatctgtcatatgaagatatgaaagatatttcattaaggtcaggactgtcgggaataggtctatcactaattagcttatacttggaagaaaataatgatgatcttttggttacttctgaaaaaattgctgatcagatagaaaataggattattgaagatgatgaattatcagttactgattttgcagcagtacctataggtttgattgatggttggtcaggaatatctttattctatgcggcattatattcagtcactaacaatgaaaaatattatttgaaatcaaaagaatatattgagcgagatttaaaacactgtaaggtagatgaagagacgaatactttgcaaacttatgatgatcaaaaccctcgattattaccctatttatctgggggatcaatcggaatagggattgctatttggtatttaaattatgtaagagacactaatttatttagagaagaattagagcaaataatcaatttaaataaagtaaggatcgcatatagcggtggattgtttgatgggatcggtagtttcttgttaatcccgccaatgactaaggaaaaaaacgaaatcagtcagcatattgagctggcaatgaaaaaactagaattgtttcttatccgtaaagatgatcaaatattattccctgggaatttcagttttcgtttagccgatgattactactccggaagtgccggcataatattgggcataaactctatccagttttcaaatccgttatattggttgccaataataaaaattgatagtttcttaagaaagactaaaaaagaattgttattaaataattaa

SEQ ID NO: 65 - DNA, 1773 bp, Bacillus velezensis
  source 1..1773: mol_type = genomic DNA
atgatgaccagcccaaaatttaaatcgatagagtttttcttcttactgagaaaaaccagaccgaatataagactatttatattggcaatatttttaagtggattaagcgcaatagcttctaccctagtgcctcattatttaaaaagtctaatagacaattataatattcttgataagatcaatttgcgggatcttttaggactattagggatatttttgagtagcggaataattggagcagttggtagttatatgttaagtgtagtaggatataatgttgtcgcaaatctcagaaatttattatgggaaaagatagttatactacctgtagagttttacgataagaatcgttctgcggacatagcaagtagatttgttaatgatactacggtgatttataacttagtaagtaactctttttcgcaatttatcaatgctatattaatagtgcttttttgtggattttggttattttactatgattggcaattgacactagtgattatagtagcaattccaatttatttgttgatttttatacctttaggaagaattttatctaaattatctaaaatgacacaaagcttaacaggaaaattaaatgtaagagctgttgaaacaatatcctcaataagactaattaaatcttcaactgcagaaaaactacaagtggaaaaaggaagagatgatattgaagctttaagaaacataggcctaaggcagacaaaatggatggttattttaaaccctatcattaatttaatgatgatgcttatcattatcagcatcattggattcggaggggttaaattagccaatggaagtttatcgccaggaacgtttatagcatttctaacccttatgttctatatcataggtccacttaataatttggggctattctttactcaaatacaaaagacgataggtgcaacagaaagaatttcgcaattgatatatgagcaaggagaagatcagcataaaggaaaagaattagcggaaacctataaagatctagtgattgaaaatttatcattttgctatggtaaagaggataaagcattttccttgaacaatattaatttagtaataaaaagaggaagtgttaatgccttagtaggtcctagtggtagtggtaaaaccacaatcatctctattctggaaagatactacaagccgaatagcggaagtatttattttggtgaagagaatattgagttatattcattaaaatcatggcgtagccaaataggatatgtagctcagaatcatgatttaataagcggtactgttagagacaatctcatctttggtttagaaaataccccaaatgaaaacagaatagtggaagcatgtaagaaggcatatgcatggcaatttataagtgaattacctaacagtttagaaactaatattggagaaaaaggtctgaatttatcagggggacaacgacaaagaattgctattgcgagaatgtttctgaagaatccaaatataatctttttggatgaagccactgctagtcttgacagtcattctgaacaaattgtgaacgaagcaatgaagaagctcatgaaggatagaaccgctattataatagcacataggttatccactattataaacgctgacaatatcatttttatggaaaacggtgaggtaacaggccaagggaatcattgggagttaaagcgcagtcataaattgtatcatcaattctgtgagcagcagtttaaagaagatagtaccgatccattagtattaaccaattaa

SEQ ID NO: 66 - DNA, 1392 bp, Bacillus velezensis
  source 1..1392: mol_type = genomic DNA
atgaagaatttaagaagaatttcgatggttttcatacttttatttgtatccagcttgcaacctattagctctcatgctgaagaatcaaattatgatgaatctatcataattaacctcgactcaaaagtaagtgaatcgacaataaacaaggttaaggataggtattccaatataggaacaaactatattaaagaattagatttattggtaatagataatataaaaccaagccaattttcagcaatcaaagatattgctaaagaaaaattagacgcaaaagaaattattgaggataaagagatttctcttcctagtaaacagctatcttctaaattggcaatttcatcacaattcacagaagataacgacactctttatgacagttggttatggaatatcaagcaagtaacaaatgattatcgaagttatcgtataaataaaggatctcataatacaaaagtaggagtaatcgattcaggcatagatttcaatcatccagacctcaaaaataatattgtagatactggagagtcttttgttccagttgaagataatacacaagacttttatgggcatggaacttctgtggctgggataattgctgctaacggggatgtaaaaggagttggaccaaatcttggtttagtgccttataaagtattcgataaaaatggtaaatctaaaactagctgggttataagcgcaattgttaaagctacggaagatgatatggacgtaattaatttaagtttatctactttcttatcaaaaaaagataaagaagatagagagactataaaactttttgaaaaagcttttaaattcgctagaaaacacaatactttaattgttgcagcagctggaaaccatggatatgatatttcaaattcaaaaaaacttgcacaacaactaggtaaaccaaaggacaatatcctacttcttcctggtggagataacgatgtaattactgtatctgccaccacagcacaaaatacaaaagcttcctactcaaattacgggaaaaccatctcgattgcagctccaggtggtgatcttgacccaagttttttggatacaaataaggttgatctatatagcttggtatggactacttcccctgtaaatatcccgcaaactccgctaagtaagtcactgggctttcaaaagggatatgaacctactttagggacaagtgtagcagctccaatagtaactgctacagcagccctattaaaaacagaatactacgaaaaatacggagtggagatgtcaaatcgcaaagttgagaaaaacttatatcaaaacacagaccactttgaaaacttaaataagaatgaagtaggtagcggtatcgtaaatgcttacgaatctttgcttaatattgagagataa

SEQ ID NO: 67 - DNA, 144 bp, Bacillus velezensis
  source 1..144: mol_type = genomic DNA
atgaataacgtattagcattacaacaattaaataaaagtgctgaggtggaaccgcaagtgggaccaacgataacaactattacagtaatacctacaatggttatatccttaataagcaattattgtgacaatcatgcttcataa

SEQ ID NO: 68 - DNA, 132 bp, Bacillus velezensis
  source 1..132: mol_type = genomic DNA
atgagagatgtattggaacttcaacaactgaatgaaggaactgaagtagaagcttcaaaaggcaaaggcggcttacttacactgatcacaacggtagtgggcacatctactattagcaacaactgcggataa

SEQ ID NO: 69 - DNA, 30 bp, synthetic construct
  source 1..30: mol_type = other DNA
cctgcataaatcaccgctgacagctcaatg

SEQ ID NO: 70 - DNA, 30 bp, synthetic construct
  source 1..30: mol_type = other DNA
gctaccactgatcgctcgaatcaaatcggc

SEQ ID NO: 71 - DNA, 27 bp, synthetic construct
  source 1..27: mol_type = other DNA
cacgacgttgtaaaacgacggccagtg

SEQ ID NO: 72 - DNA, 26 bp, synthetic construct
  source 1..26: mol_type = other DNA
gtgagcggataacaatttcacacagg
